United States Patent Application Publication US 2012/0005773 A1 - sequence listing, part 9

SEQ ID NO: 35233 - protein, 290 aa, Neptuniibacter caesariensis
MKVAFIGLGVMGYPMAGHLSKAGHDVTVFNRTTAKAEAWSEDYKGAFAVTPAEAAKGADIVFTCVGNDDDLREVTCGDQGVFNGMTEGSILVDHTTASAEIARELASLAADKGIGFLDAPVSGGQAGAENGVLSVMVGGDQASFDKAEPVMDAYSKSIRLLGEAGAGQLAKMVNQICIAGLVQGLAEGVHFAKRAGLDAAQVFDVIQHGAAGSWQMVNRHQTMIDDEYDFGFAVDWMRKDLNIVLDEARKNGARLPITAIVDQFYADVQEMGGNRCDTSSLLMRLEKREK

SEQ ID NO: 35234 - protein, 404 aa, Neptuniibacter caesariensis
MKTPIYLDYSATTPVDSRVADKMIECLTMEGNFGNPASRSHLFGWKAEEAVETARRQVADLINADPREIVWTSGATESDNLAIKGAAHFYQKKGKHIITSKIEHKAVLDTCRQLEREGFEVTYLTPNADGLIEPSLVEEAIREDTIVVSLMHVNNEIGTITDIAAIGEITRAKGIVFHVDAAQSAGKVEIDMAAAKVDLLSLSAHKMYGPKGIGALYVRRKPRIRLEAQMHGGGHERGMRSGTLPTHQIVGMGEAARICKEDLADDTRRIIELRDRFMAGMGEMEEVYVNGSREQRIPGNLNISFAFVEGESLLMSLKDLAVSSGSACTSASLEPSYVLRALGLNDELAHSSIRFSFGRFTTEEEVDYAAAQIQDAVNKLRELSPLWDMYKDGVDLSKVEWVHH

SEQ ID NO: 35235 - protein, 574 aa, Escherichia coli str. K12 substr. W3110
MEMLSGAEMVVRSLIDQGVKQVFGYPGGAVLDIYDALHTVGGIDHVLVRHEQAAVHMADGLARATGEVGVVLVTSGPGATNAITGIATAYMDSIPLVVLSGQVATSLIGYDAFQECDMVGISRPVVKHSFLVKQTEDIPQVLKKAFWLAASGRPGPVVVDLPKDILNPANKLPYVWPESVSMRSYNPTTTGHKGQIKRALQTLVAAKKPVVYVGGGAITAGCHQQLKETVEALNLPVVCSLMGLGAFPATHRQALGMLGMHGTYEANMTMHNADVIFAVGVRFDDRTTNNLAKYCPNATVLHIDIDPTSISKTVTADIPIVGDARQVLEQMLELLSQESAHQPLDEIRDWWQQIEQWRARQCLKYDTHSEKIKPQAVIETLWRLTKGDAYVTSDVGQHQMFAALYYPFDKPRRWINSGGLGTMGFGLPAALGVKMALPEETVVCVTGDGSIQMNIQELSTALQYELPVLVVNLNNRYLGMVKQWQDMIYSGRHSQSYMQSLPDFVRLAEAYGHVGIQISHPHELESKLSEALEQVRNNRLVFVDVTVDGSEHVYPMQIRGGGMDEMWLSKTERT

SEQ ID NO: 35236 - protein, 467 aa, Escherichia coli str. K12 substr. W3110
MQTTQQNAPLKRTMKTRHLIMLSLGGVIGTGLFFNTGYIISTTGAAGTLLAYLIGALVVWLVMQCLGELSVAMPETGAFHVYAARYLGPATGYTVAWLYWLTWTVALGSSFTAAGFCMQYWFPQVPVWVWCVVFCAIIFGLNVISTRFFAEGEFWFSLVKVVTIIAFIILGGAAIFGFIPMQDGSPAPGLSNITAEGWFPHGGLPILMTMVAVNFAFSGTELIGIAAGETENPRKVIPVAIRTTIARLIIFFIGTVFVLAALIPMQQVGVEKSPFVLVFEKVGIPYAADIFNFVILTAILSAANSGLYASGRMLWSLSNERTLPACFARVTKNGVPLTALSVSMLGGVLALFSSVVAPDTVFVALSAISGFAVVAVWLSICASHFVFRRRHLQQGKALSELHYRAPWYPLVPVLGFVLCLVACVGLAFDPAQRIALWCGLPFVALCYGAYFLTQPRNAKQEPEHVAE

SEQ ID NO: 35237 - protein, 220 aa, Escherichia coli str. K12 substr. W3110
MELYLDTSDVVAVKALSRIFPLAGVTTNPSIIAAGKKPLDVVLPQLHEAMGGQGRLFAQVMATTAEGMVNDALKLRSIIADIVVKVPVTAEGLAAIKMLKAEGIPTLGTAVYGAAQGLLSALAGAEYVAPYVNRIDAQGGSGIQTVTDLHQLLKMHAPQAKVLAASFKTPRQALDCLLAGCESITLPLDVAQQMISYPAVDAAVAKFEQDWQGAFGRTSI

SEQ ID NO: 35238 - protein, 461 aa, Escherichia coli str. K12 substr. W3110
MAINSPLNIAAQPGKTRLRKSLKLWQVVMMGLAYLTPMTVFDTFGIVSGISDGHVPASYLLALAGVLFTAISYGKLVRQFPEAGSAYTYAQKSINPHVGFMVGWSSLLDYLFLPMINVLLAKIYLSALFPEVPPWVWVVTFVAILTAANLKSVNLVANFNTLFVLVQISIMVVFIFLVVQGLHKGEGVGTVWSLQPFISENAHLIPIITGATIVCFSFLGFDAVTTLSEETPDAARVIPKAIFLTAVYGGVIFIAASFFMQLFFPDISRFKDPDAALPEIALYVGGKLFQSIFLCTTFVNTLASGLASHASVSRLLYVMGRDNVFPERVFGYVHPKWRTPALNVIMVGIVALSALFFDLVTATALINFGALVAFTFVNLSVFNHFWRRKGMNKSWKDHFHYLLMPLVGALTVGVLWVNLESTSLTLGLVWASLGGAYLWYLIRRYRKVPLYDGDRTPVSET

SEQ ID NO: 35239 - protein, 452 aa, Escherichia coli str. K12 substr. W3110
MSHNVTPNTSRVELRKTLTLVPVVMMGLAYMQPMTLFDTFGIVSGLTDGHVPTAYAFALIAILFTALSYGKLVRRYPSAGSAYTYAQKSISPTVGFMVGWSSLLDYLFAPMINILLAKIYFEALVPSIPSWMFVVALVAFMTAFNLRSLKSVANFNTVIVVLQVVLIAVILGMVVYGVFEGEGAGTLASTRPFWSGDAHVIPMITGATILCFSFTGFDGISNLSEETKDAERVIPRAIFLTALIGGMIFIFATYFLQLYFPDISRFKDPDASQPEIMLYVAGKAFQVGALIFSTITVLASGMAAHAGVARLMYVMGRDGVFPKSFFGYVHPKWRTPAMNIILVGAIALLAINFDLVMATALINFGALVAFTFVNLSVISQFWIREKRNKTLKDHFQYLFLPMCGALTVGALWVNLEESSMVLGLIWAAIGLIYLACVTKSFRNPVPQYEDVA

SEQ ID NO: 35240 - protein, 355 aa, Escherichia coli str. K12 substr. W3110
MSQKYLFIDRDGTLISEPPSDFQVDRFDKLAFEPGVIPELLKLQKAGYKLVMITNQDGLGTQSFPQADFDGPHNLMMQIFTSQGVQFDEVLICPHLPADECDCRKPKVKLVERYLAEQAMDRANSYVIGDRATDIQLAENMGITGLRYDRETLNWPMIGEQLTRRDRYAHVVRNTKETQIDVQVWLDREGGSKINTGVGFFDHMLDQIATHGGFRMEINVKGDLYIDDHHTVEDTGLALGEALKIALGDKRGICRFGFVLPMDECLARCALDISGRPHLEYKAEFTYQRVGDLSTEMIEHFFRSLSYTMGVTLHLKTKGKNDHHRVESLFKAFGRTLRQAIRVEGDTLPSSKGVL

SEQ ID NO: 35241 - protein, 490 aa, Escherichia coli str. K12 substr. W3110
MVPVVALVGRPNVGKSTLFNRLTRTRDALVADFPGLTRDRKYGRAEIEGREFICIDTGGIDGTEDGVETRMAEQSLLAIEEADVVLFMVDARAGLMPADEAIAKHLRSREKPTFLVANKTDGLDPDQAVVDFYSLGLGEIYPIAASHGRGVLSLLEHVLLPWMEDLAPQEEVDEDAEYWAQFEAEENGEEEEEDDFDPQSLPIKLAIVGRPNVGKSTLTNRILGEERVVVYDMPGTTRDSIYIPMERDGREYVLIDTAGVRKRGKITDAVEKFSVIKTLQAIEDANVVMLVIDAREGISDQDLSLLGFILNSGRSLVIVVNKWDGLSQEVKEQVKETLDFRLGFIDFARVHFISALHGSGVGNLFESVREAYDSSTRRVGTSMLTRIMTMAVEDHQPPLVRGRRVKLKYAHAGGYNPPIVVIHGNQVKDLPDSYKRYLMNYFRKSLDVMGSPIRIQFKEGENPYANKRNTLTPTQMRKRKRLMKHIKKNK

SEQ ID NO: 35242 - protein, 393 aa, Escherichia coli str. K12 substr. W3110
MKDVVIVGALRTPIGCFRGALAGHSAVELGSLVVKALIERTGVPAYAVDEVILGQVLTAGAGQNPARQSAIKGGLPNSVSAITINDVCGSGLKALHLATQAIQCGEADIVIAGGQENMSRAPHVLTDSRTGAQLGNSQLVDSLVHDGLWDAFNDYHIGVTAENLAREYGISRQLQDAYALSSQQKARAAIDAGRFKDEIVPVMTQSNGQTLVVDTDEQPRTDASAEGLARLNPSFDSLGSVTAGNASSINDGAAAVMMMSEAKARALNLPVLARIRAFASVGVDPALMGIAPVYATRRCLERVGWQLAEVDLIEANEAFAAQALSVGKMLEWDERRVNVNGGAIALGHPIGASGCRILVSLVHEMVKRNARKGLATLCIGGGQGVALTIERDE

SEQ ID NO: 35243 - protein, 431 aa, Escherichia coli str. K12 substr. W3110
MNEFPVVLVINCGSSSIKFSVLDASDCEVLMSGIADGINSENAFLSVNGGEPAPLAHHSYEGALKAIAFELEKRNLNDSVALIGHRIAHGGSIFTESAIITDEVIDNIRRVSPLAPLHNYANLSGIESAQQLFPGVTQVAVFDTSFHQTMAPEAYLYGLPWKYYEELGVRRYGFHGTSHRYVSQRAHSLLNLAEDDSGLVVAHLGNGASICAVRNGQSVDTSMGMTPLEGLMMGTRSGDVDFGAMSWVASQTNQSLGDLERVVNKESGLLGISGLSSDLRVLEKAWHEGHERAQLAIKTFVHRIARHIAGHAASLRRLDGIIFTGGIGENSSLIRRLVMEHLAVLGLEIDTEMNNRSNSCGERIVSSENARVICAVIPTNEEKMIALDAIHLGKVKEGANKRGNSSRLTQSFHFFMFEPIFSPVNALNQPI

SEQ ID NO: 35244 - protein, 305 aa, Escherichia coli str. K12 substr. W3110
MQCGISDGLPGFSYADADGKFSGIDVDICRGVAAAVFGDDTKVKYTPLTAKERFTALQSGEVDLLSRNTTWTSSRDAGMGMAFTGVTYYDGIGFLTHDKAGLKSAKELDGATVCIQAGTDTELNVADYFKANNMKYTPVTFDRSDESAKALESGRCDTLASDQSQLYALRIKLSNPAEWIVLPEVISKEPLGPVVRRGDDEWFSIVRWTLFAMLNAEEMGINSQNVDEKAANPATPDMAHLLGKEGDYGKDLKLDNKWAYNIIKQVGNYSEIFERNVGSESPLKIKRGQNNLWNNGGIQYAPPVR

SEQ ID NO: 35245 - protein, 367 aa, Escherichia coli str. K12 substr. W3110
MDRIIQSPGKYIQGADVINRLGEYLKPLAERWLVVGDKFVLGFAQSTVEKSFKDAGLVVEIAPFGGECSQNEIDRLRGIAETAQCGAILGIGGGKTLDTAKALAHFMGVPVAIAPTIASTDAPCSALSVIYTDEGEFDRYLLLPNNPNMVIVDTKIVAGAPARLLAAGIGDALATWFEARACSRSGATTMAGGKCTQAALALAELCYNTLLEEGEKAMLAAEQHVVTPALERVIEANTYLSGVGFESGGLAAAHAVHNGLTAIPDAHHYYHGEKVAFGTLTQLVLENAPVEEIETVAALSHAVGLPITLAQLDIKEDVPAKMRIVAEAACAEGETIHNMPGGATPDQVYAALLVADQYGQRFLQEWE

SEQ ID NO: 35246 - protein, 324 aa, Escherichia coli str. K12 substr. W3110
MKPSVILYKALPDDLLQRLQEHFTVHQVANLSPQTVEQNAAIFAEAEGLLGSNENVNAALLEKMPKLRATSTISVGYDNFDVDALTARKILLMHTPTVLTETVADTLMALVLSTARRVVEVAERVKAGEWTASIGPDWYGTDVHHKTLGIVGMGRIGMALAQRAHFGFNMPILYNARRHHKEAEERFNARYCDLDTLLQESDFVCLILPLTDETHHLFGAEQFAKMKSSAIFINAGRGPVVDENALIAALQKGEIHAAGLDVFEQEPLSVDSPLLSMANVVAVPHIGSATHETRYGMAACAVDNLIDALQGKVEKNCVNPHVAD

SEQ ID NO: 35247 - protein, 268 aa, Escherichia coli str. K12 substr. W3110
MFTDTINKCAANAARIARLSANNPLGFWVSSAMAGAYVGLGIILIFTLGNLLDPSVRPLVMGATFGIALTLVIIAGSELFTGHTMFLTFGVKAGSISHGQMWAILPQTWLGNLVGSVFVAMLYSWGGGSLLPVDTSIVHSVALAKTTAPAMVLFFKGALCNWLVCLAIWMALRTEGAAKFIAIWWCLLAFIASGYEHSIANMTLFALSWFGNHSEAYTLAGIGHNLLWVTLGNTLSGAVFMGLGYWYATPKANRPVADKFNQTETAAG

SEQ ID NO: 35248 - protein, 225 aa, Persea borbonia
KRIENKINRQVTFAKRRNGLLKKAYELSVLCDAEVALIIFSNRGKLYEFCSSSSMLKTLERYQKCNYGAPETTVSTRETQSSHQEYLKLKARVEALQRSQRNLLGEDLGPLTSKELDTLEKQLDASLKQIRSTRTQYMLDQLADLQRREQMLSEANKNLKRRLEEGMQANPQVWDPNGHPVTYGRQQAPPQSDGFFHPLDTCEPTLHIGYQPADQITIAAPGPSV

SEQ ID NO: 35249 - protein, 220 aa, Persea borbonia
KRIENKINRQVTFAKRRNGLLKKAYELSVLCDAEVALIVFSTRGKLYEFCSTASMLKTLERYQKCNYGAPETTVSSRELQSSHQEYMKLKARVEALQRSQRNLLGEDLGPLTGKELDTLEKQLDVSLKHIRSTRTQYMLDQLGDLQRREHMLSEANKSLRRRLEEGMQENPNHAWDPNGYVRQQAPPQSDGFFHPIECEPTLQIGYQSSQITIAAPGPNV

SEQ ID NO: 35250 - protein, 223 aa, Persea americana
MGRGKIEIKRIENTTNRQVTFCKRRNGLLKKAYELSLLCDAEVALIVFSSRGRLYEYANNSVKTTIERYKKASADTSNGGSTTEVNSQFYQQESSKLRQQIGILQNANRHLMGEALSSMTVKELKQLETRLEKGISRIRSKKNELLFAEIEYMQKREVDLQNDNLYLRAKIAENERAQQHMNMLPAPEYDVMPAFDSRNFLQVNLLEPNNHYSHQEQTALQLG

SEQ ID NO: 35251 - protein, 204 aa, Persea borbonia
TNRQVTFCKRRNGLLKKAYELSLLCDAEVALIVFSSRGRLYEYANNSVKTTIERYKKASADTSNGGSTTEVNSQFYQQESSKLRQQIGILQNANRHLMGEALSSMTVKELKQLETRLEKGISRIRSKKNELLFAEIEYMQKREVDLQNDNLYLRAKIAENERAQQHMNMLPAPEYDVMPAFDSRNFLQVNLLEPNNHYSHQEQT

SEQ ID NO: 35252 - protein, 656 aa, Blastocystis hominis
MSKTYTGESVGIDLGTTYSCVGVWQNDKVEIIANDQGQRTTPSYVAFTDTERLIGDAAKNQVAMNPTNTVFDAKRLIGRKFDDPSVQSDMKHWPFTLKAGPDGKPLIEVEYKGEKKTFSPEEISSMVLSKMKQIAEAYLGKEVKNAVITVPAYFNDSQRQATKDAGVIAGLNVMRIINEPTAAAIAYGLDQKGGEKNILIFDLGGGTFDVSLLSIEDGIFEVKATAGDTHLGGEDFDNRMVEYFCTEFQRKFRKDLTTSQRALRRLRTACERAKRTLSSSTQATIEIDSLFEGIDFNSQITRARFEELNMDYFRKTMAPVEKVLRDAKLSKSEVDEVVLVGGSSRIPKVQKLLQEFFNGKELCQSINPDEAVAYGATVQAAVLSGKGAGSKLDDLLLLDVAPLSLGLETAGGVMTVLIPRNTTIPTKKTQVFSTYSDNQPGVLIQVYEGERSMTRDNNLLGKFHLDGIPPMPRGVPQIEVTFDIDADGILNVSAVEKSTGKENKITIKNEKGRLSADEIEKMVQEAEKFKAEDEANKARIEAKNSLENYTFTVRNSLRDEAVSSKLPEADKKAIEAKIDAAVSWLDDHPNAEKEEYEQKQKELEAAIMPIFSKMAGNAPAGGMPGGMPGGMPTGGMPTNEDSGAKEDDGPHIEEVD

SEQ ID NO: 35253 - protein, 198 aa, Mycobacterium avium subsp. paratuberculosis
TPHDHRTSRQDPQRGSVGAGRSRTAQRHREDQAGRRAAEQIGERIINVYAKQGFDSIDKSDLRGRFRWMGLYTQREQGYDGSWTGDDNTDKIEAKYFMMRVRSDGKAMSAHTMRTLGQISTEFARDTADISDRENLQLHWIRIEDVPEIWRRLESVGLQTTEACADCPRGIHGSPLAGTRSTRCSIRRPRSRRSSVAP

SEQ ID NO: 35254 - protein, 161 aa, Oryza sativa
MSDSEEHHFESKADAGASKTYPQQAGTIRKTGHIVIKNRPCKVVEVSTSKTGKHGHAKCHFVAIDIFNGKKLEDIVPSSHNCDVPHVNRTDYQLIDISEDGFVSLLTESGGTKDDLRLPSDEALLTQIKDGFAEGKDLIVTVMSAMGEEQICALKDIGPKN

SEQ ID NO: 35255 - protein, 289 aa, Capsella rubella
MMLEKDDLGLSLGLNYPKKQMNLNSNPSVSVTPSSSSFGLLRRSSLNESFTSSVPNSDSSQKETRTFIRGIDVNRPPSTAEYGEEDAGVSSPNSTVSSSTGKRSEREEDTDPQGSRGGISDDEDGDNSRKKLRLSKDQSAILEETFKDHSTLNPKQKQALAKQLGLRARQVEVWFQNRRARTKLKQTEVDCEFLRRCCENLTEENRRLQKEVTELRALKLSPQFYMHMSPPTTLTMCPSCEHVSAPPPQQPPQAATSAQHHRGSLPVNAWAQGTRISHGLTFDALRPRS

SEQ ID NO: 35256 - protein, 606 aa, Arabidopsis thaliana
MQTMKKKEGEEETRDGTVDYYGRPSIRSNSGQWVAGIVILLNQGLATLAFFGVGVNLVLFLTRVLQQNNADAANNVSKWTGTVYIFSLVGAFLSDSYWGRYKTCAIFQVIFVIGLSSLSLSSYMFLIRPRGCGDEVTPCGSHSMMEITMFYFSIYLIALGYGGYQPNIATLGADQFDEEHPKEGYSKIAFFSYFYLALNLGSLFSNTILGYFEDEGMWALGFWASTGSAIIGLILFLVGTPRYRYFKPTGNPLSRFCQVLVAATKKSSVEAPLRGREEMYDGDSEGKNASVNTGRRIVHTDEFKFLDKAAYITARDLDDKKQDSVNPWRLCPVTQVEEVKCILRLMPIWLCTIIYSVVFTQMASLFVEQGAAMNTSVSDFKIPPASMSSFDILSVALFIFLYRRVLEPVANRFKKNGSKGITELHRMGIGLVIAVIAMIAAGIVECYRLKYADKSCTHCDGSSSLSIFWQAPQYSLIGASEVFMYVGQLEFFNAQTPDGLKSFGSALCMMSMSMGNFVSSLLVTMVVKISTEDHMPGWIPRNLNKGHLDRFYFLLAALTSIDLVVYIACAKWYKPIQLEGKDEMQDMSDDDYDTESEEEREKDSKV

SEQ ID NO: 35257 - protein, 924 aa, Lathyrus sativus
MMELQVIWIIRLVVACVLCLCIFIISASSATEGFESIACCADSNYTDPKTNLNYTTDYRWYSDKSSCRQIPKILLSHRSNVNFRLFDIDEGKRCYNLPTIKDQVYLIRGIFPFDSVNSSFYVSIGATELGEVTSSRLEDLEIEGIFRAPKDNIDFCLLKEDVNPFISQLELRPLPEEYLHDFSTNVLKLISRNNLCGIEEDIRFPVDQNDRIWKATSTPLNALPLSFNVSIVDLNGKVTPPLKVLQTALTHPERLEFVHNGLETEDYEYSVLLYFLELNNTLKAGERVFDIYLNSEIKKESFDVLEGGSKYSYTVLNISANGSLNITLVKASGSKFGPLSPALKILQARPWIDETNQTDLEVIQKMRKELLLQNQDNEALESWSGDPCMLFPWKGVACDSSNGSSVITKLDLSSSNLKGTIPSSVTEMTKLQILNLSHNHFDGYIPSFPPSSLLISVDLSYNDLTGQLPESIISLPHLNSLYFGCNQHMSNDDEAKLNSSLINTDYGRCNAKKPKFGQVFMIGAITSGSILITLAVVILFFCRYRHKSITLEGFGGKTYPMATNIIFSLPSKDDFFIKSVSVKPFTLEYIELATEKYKTLIGEGGFGSVYRGTLDDGQEVAVKVRSATSTQGTREFDNELNLLSAIQHENLVPLLGYCNEYDQQILVYPFMSNGSLLDRLYGEPAKRKILDWPTRLSIALGAARGLAYLHTFPGRSVIHRDVKSSNILLDHSMCAKVADFGFSKYAPQEGDSYVSLEVRGTAGYLDPEYYKTQQLSEKSDVFSFGVVLLEIVSGREPLNIKRPRVEWSLVEWAKPYIRASKVDEIVDPGIKGGYHAEALWRVVEVALQCLEPYSTYRPCMVDIVRELEDALLIENNASEYMKSIDSLGGSNRYSIVMDKRGVPLTSTSAESTLPAQNVSHPQPR

SEQ ID NO: 35258 - protein, 320 aa, Pseudomonas alcaligenes
MRSTNTRSARSRPTKRSVNASATPTQSFHRVDAHLSLLEGAEETGWVEFKTNTRVERIEQDADSVTVYDQNGNAYRGVALIGADGVRSVVRQTYVNDQPRVTGHVVYRAVVDKDEFPQDLRWNASSLWVGPKCHLVHYPLRGGEQYNIVVTFQSRQQEEWGVTEGSKEEVESYFQDICPKARQLIGLPKSWKRWATADREPIPQWTFGRTTLLGDAAHPTTQYMAQGACMALEDAVTLGEALRVHGNDWGKALDLYQRSRITRTARIVLSGREMGRLYHAQGVERLVRNSLWKGRTTEQFYDAIQWLYGWNVDNCLSESI

SEQ ID NO: 35259 - protein, 384 aa, Francisella tularensis subsp. holarctica
MSEILVLNCGSSSVKFALINPHTSQSLVTGLAENIATKNCKVVFKAEHKIEKYLENGSYKDVFEMLKDFLVENKHLEKIVAIGHRVVHGGQYFSKSVLINADSLEKIKACIALAPLHNPAHIEGIRFCQQIFPELPQVAVFDTAFHQTVPSYIAEYAIPYELTHKHNIRKYGAHGTSHKYVSEQAAKILTQQKANVIVAHLGNGCSITAVVDGKSIDTSMGLTPLDGLVMGTRSGCIDPSIFAYISDNLGWSVTEITNMLNKQSGLLGICGHNDMREVSQLAAKGDSLAKLAIEIFSHRVAKFVASYMIYFNKLDALVFTGGIGENAANIRKNIISKLANLGFMIDHQKNSNSETFINSKNSHNIMVIATNEELMIAQETQNLI

SEQ ID NO: 35260 - protein, 698 aa, Francisella tularensis subsp. holarctica
MKKSIFILPTSKHTGLRLLASSMVYALQQKGLKVGSFHPIYDMQMSIKNIQEYLLNNRVKDYVEIVLDKFYQKSQEFDFIIISGLFRQGNNAHKLYPINAIIDELNIEIVKALSSEVIITSYHGNKPLIDINDELDYAMRSLPKQINIIGTIITKLNAPYDDDGRVSFSLTDEDISSEQQQQVTVNMLRELPVFAQKGLNLIGVVEWQQEKTSPRILDIKNILKLNLISRVSLEARVDRVMMCSRGVDNFINDLTPNSLVITSADRSDILVTVCLAAKNGMKIAGILLTAEEYLNDKVKELCVETAEKVGLAILTTRNKSVKTILRIADIDLMGIPLDDKERIQRVKEIICNSLDRDKIINAITADVLGHQVMSPPAFRYHLLKMATKAKKRIILPESYEPRTLQAAKNSHEQGLAECVLIGDRDKIHKVAEMNGFSLPKDIQVVNIDDEAEIKYLNTLMNLRKHKGLSESMARDALKNPIVVATVMLYLGEVDGLVSGAEHTTADVLRPALQLIKIKPNSSLVSSVFFMCMPDQVIVFGDCAVNQDPSAEQLVDIAIQSAESAKKFGIEPRVAMISYSTGTSGSGVQVEKVRTATELLKQKAPELLVDGPLQYDAAMIESVAKSKAPDSPVAGRATVLIFPDLNTGNTVYKAVQRSANVLSIGPVLQGINKPVNDLSRGATVDDITYTIAITAIQAI

SEQ ID NO: 35261 - protein, 859 aa, Francisella tularensis subsp. holarctica
MDINKFTIKLQEALAEAQSYAFQQKATEFTSAHILKALLEQNDSVAISILSVCGVNIQNFIKAVNDMVDSVAVLSGEGNPQVTPSRDLIATLHKMQGLANKNDDEFISSEVFLLASLEDKSLTGLYNKFGITKEKLTKAVNDYRGGEKVSSQNQEDMKGALDKYTVDLTDLARKGKIDPIIGRDSEIRRTIQVLQRRTKNNPVLIGEPGVGKTAIVEGLAQRIVNDEVPEGVKGKKVLSLDMGALLAGAKFRGDFEERLKSVLKELSKQEGNVILFIDELHTMVGAGKAEGSMDAGNMLKPALARGELKCVGATTLDEYREYVEKDPALERRFQKVLVDEPTVEDTIAILRGLKERYELHHGVNITDSAIVSAATLSHRYITDRQLPDKAIDLVDEAASQIRMEIDSKPEKMESLYRRIIQLKMQREQLKKEKDDATKKRLEILEQEIKGLDSEYKGLEELWKAEKLKMQGTSKLKEELEKAKFELEKYQRVGDLSKMAELQYGKIPELEAQIKQIEETEAEPSENKLVRTSVTENEIADVVSKATGIPVSKMMEGEKDKLLNMESFLHKRVIGQDQAIKAVSNAVRRSRSGLSDPNRPIGSFMFLGPTGVGKTELTKALAEFLFDDEDAMLRVDMSEFMEKHSVARLIGAPPGYVGYEQGGYLTEHVRRKPYSVILLDEVEKAHADIFNILLQVLDDGRLTDGQGRTVDFKNTVIVMTSNLGSHRIQEMQGQDYETVKSAVMEMVLSHFRPEFVNRVDDAIVFEPLNKEMITEIAKIQIKRLEKRLADLSIGLEVTTEAMDKLADAGFDPVFGARPLKRAIQNNLENPLALKLLDGEFKAEDKIVVDIDANNNITFSK

SEQ ID NO: 35262 - protein, 551 aa, Francisella tularensis subsp. holarctica
MKANHIRILLLVTIAIMFISLMGKWEQTFPADNTKQQTSATQNNSHYDNADSSTNTDVTITDAKSSLAKETNFSKYDNAKSITINTVVFKDVKVSLLDGAIISASLKDYSISLDDKTPMSLLTDKSGSEYIAKSTIVVNKQPISVNFEDQGIKIENSKQILTLTGSADGLQITRTYTFDDTKYNISVSQNIKNTTSAPVNVIVDDSFARDFDPAGDSFSLLNAHSYTFTGVAYSTAKDSFRKESFKDISKTNGQPTVINSDGQGWVAFLQHYFVSAWIPQSTNAKIYYKNLNGDVFEAGAFTGATIAPNQSENISSILYTGPIIKANLVDLAPNLEKTLDYGMLSFFSEIIFWVMNHIHSLVGNWGLAIILVTCLIKLIFYPLSAKSYRSMAKMRMLQPRIKRLQETYKDDRQALGKKMMELYKEEKVNPLSGCLPMLIQIPIFISLYWVLLESVELRQAPFIFWIHDLSMKDPYFVLPVLMGLSMFLQQKLSPAPADPMQAKVMMFLPVIFTFLFASFPSGLVLYWLTNNLISISQQWIITRHYQATHKK

SEQ ID NO: 35263 - protein, 396 aa, Francisella tularensis subsp. holarctica
MQLSRRVKAMQASPVRKLVPYSIQAEKQGKKVYYLNIGQPDIKTPNEFMDAIRAYDKETIAYSIASGEPSLIKAISKYYKRFDMDFAEDEILITNGGSEALIFAAIATCNAGDEILVPEPFYTNYNGFTTAVDVSIRPITTKAEEGFHLPSKEEILACVTDKTRAIMISNPGNPTGVVYTKQELETLAEVAKEKDLFIISDEVYREFTYDGLVCTSFGNIKGVEDRVIIVDSVSKRYSACGARIGSLCSKNKEFIKEATKLCQARLCVPTLEQIGAAALYEVSEDYLKEVNTEYQKRRDITFEALSKMDNVVCEKPTGAFYVIAKLPIDDAEKFALWLLTDFEDNRETVMISPAGDFYATKGLGKDEIRIAYILEEKSLRRALELLDKAIKAYNSK

SEQ ID NO: 35264 - protein, 628 aa, Francisella tularensis subsp. holarctica
MCGVVGFYSFNKEEGFDSIINQSLLSIKHRGSDDSGYWCDNQVTLGHTRLSIHDITNAGHQPMLSNSGNTAIVFNGEIYNYLSIKNQLLSEYSNLKFKSNSDTEVLVNAIELWGIDKTLEKCIGMFAFGVYSRKTSCLILARDRFGEKPLYFGIQNGILGFASELKALKPLKECGWRFDIDRDALAAYMRYAYVPTPYSIYKNISKLNVGSYIKFDAKGNSKEYKYWDSKKVLDSEKYKDSYDQAILDLEIKLKSTLSIQMQSDVPLGAFLSGGIDSTTVIALMQSMSKDKINTFSIGFNQKEYNEAEHARAVAKHIGTNHTDMYVTERDALDVIPKLAGIYDEPFADSSQIPTYLVSKIAKSKVTVALSGDAGDELFGGYNRYFLAPNIAKKIKFAKLLKYAPDAWIKKAEILNFGKFALLADKLLKLKRVLEKAKTNKELYVLLCSQINDTSFVLGAKEYDILRDKNIYDIPQLSFQEWMMFVDSNTYMIDDILVKVDRAAMANSLETRVPFLDHNIYEFAYSLPIDYKIQRGNGKRILKDLLYKYVPESLVNRSKMGFGIPLAKWLREDLREWADNLLDYSKIDKQGYLSPEVVQKYWQEHLSGKRNWQAILWNILIFQEWLDNE

SEQ ID NO: 35265 - protein, 528 aa, Francisella tularensis subsp. holarctica
MHISERRKWYIGFAVFVMVILLSLSLLHASIWFSIGFVAVLAVIAIYDVSQTKHSILRNFPIVGHMRYILEFLRPEIQQYFIADNESEKPFGRELRSTIYRRAKGINDTVAFGTEKDIYRVGYEWVTHSLMPKHLDEIETRVKIGGSDCKQPYMASHLNISAMSFGALSANAVMALNKGAKLGGFYQCTGEGGLTKYHLQGGDLVFQIGTGYFGCRTDDGKFSAEKFVEKANLDRVKMIEIKLSQGAKPSHGGVLPAAKITPEIAEIRGVSMGKDVLSPPAHSAFSTPIEFCYFIKQLRDLSNGKPIGFKLCIGSHVEFLAICKAMLETGIRPDFITVDGADGGTGAAPLEFSNHIGMPLEDSLIFVHNALVGCGLRDEIRIIASSKVATGFDMVRLFAMGADTCNSARAMMLAIGCIQSRQCNNNTCPVGVATQNPRLEKALVVEDKMYRVYNFHKVTIQSCLEIIGAMGLISTDDVEPENLKKRISVNEIKSYADLYDFIPERCLVDGNIPASFARSWEKARADSF

SEQ ID NO: 35266 - protein, 91 aa, Francisella tularensis subsp. holarctica
MLISVLKSKISYATVTGKDLFYVGSITIDSEIMKQANIIENEKVQVVNLNNGERLETYVIKGEPNSKTIALNGPAARRCEIGDQLFIISYA

SEQ ID NO: 35267 - protein, 391 aa, Francisella tularensis subsp. holarctica
MSLIYLDYAATTPLSQSVKNSMLNSITSDDDFFNSGSLTYQQAEIVSNKIEQARATIAQTLEVLPREVIFTSGATESNNLAIKGVAYAYKDRGRHIITSKAEHKAVLDVCKFLETQGFDVTYLDVNQFGEVDLEQLKKAITPQTILVSLMAVNNELGTKNNLIEIGKITKQKGVMLHVDAAQGYGKVDIDIKVMNIDLLSVSGHKLYAPKGVGFLYLRSKRPKVRLVKQIHGGAQEFNLRAGTLATYQIFALAIAVKEMFAKKQQNFEYVLEMRRVFLDIIQDLASIKINTDLENSYPGILSVTFLGVKGETLLALVDGVCMSMGSACNSQAVEPSHVLSAIGLTATQAESTLRISFGLQTNKKQVIQAANLLKEKVQLLRALSPQGEVNV

SEQ ID NO: 35268 - protein, 397 aa, Francisella tularensis subsp. holarctica
MASLNKKIQNVSTSPTNAMAALAKQIKDQGNDVISLAIGEPGFSTPDIIKAAGIEAINKDITKYTNVDGLKELREAIVARYKREYGIEFAADQVCVTSGAKHSLHNIFNCILEAGDEAIFFAPYWVSYPDMIALTGAKPVVVETKFENNFEIDVTDLEKHITAKTKAVIINSPNNPTGLIYSKKCIEDLANLLRKYPNIWIIGDDIYDQLYFKDRVTLITEVAPDLADRYVIASGVSKNFAMTGWRVGFTIAPKLLNDALKKFQSQSATCACSISQYAAITAMNMPAQDLQYFVESYKQKAQFITKYLEAMPYIDVKSAEGTFYLFPDLRKLLEHTNFSTDVELCNALLREEYVAMMPGVAFGLSGFARISCANEMPELEEAMTRVARFINKHVSTK

SEQ ID NO: 35269 - protein, 297 aa, Francisella tularensis subsp. holarctica
MKKCGYISIIGRPNVGKSTLLNNILKYKVSITSRKPQTTRHQITGIKTLGDTQFIYVDTPGIHIKEPKAINKFMNKAATTMFKDVDVILFVVEMGKWTELEDNIVEKLKHSEIPIFLVVNKVDKKKSLEAAMFIEYIKEKLSFYDVIYVSAKQGHNINELESRIEKLLPESEYFFYEEDQITDRSIKFMVAEIIREKIMRTIGSEVPYQIAVEIDSYKVDQEKNIVYIYASILVERNSQKGIVIGAKGAKLKKIGTDSRIDIERLVGMQVNLKTHVKVKSGWSDDDRALKSLGYDLI

SEQ ID NO: 35270 - protein, 322 aa, Francisella tularensis subsp. holarctica
MSEDLMIFSGNASKKLASEVAKELGATLGNATVDRFKDGEIHVVLNENVRGKDVFVIQSTCPPSDNLMELILLIDALKRSSAERVTAVLPYFGYARQDRRSKSARVPISAKVVANLLQAVGLDRILSVDIHAEQIQGFFDIPFDNAFATKIFLEYVRKNPEKYQNIKIVSPDMGGVVRARSVAKNLGVEIAVVDKRRPKPNVAEVMNIIGEVDGKHCILVDDIMDTGGTMCQAAKALIEKGGAAKVSAFCVHPLLSGDAIKNIEDSAIDELIVTDSIPLKPHAEACSKIKVITLAPLLAQIVEKTNGEESVSDIFRTDGLVD

SEQ ID NO: 35271 - protein, 642 aa, Francisella tularensis subsp. holarctica
MGKIIGIDLGTTNSCLAIMDGKTAKVIENAEGHRTTPSVVAYTDSGEILVGQAAKRQAVTNPDNTFFAIKRLIGRKYDDKAVQEDIKKKVPYAVIKADNGDAWVATKEGKKMAPPQVSAEVLRKMKKTAEDYLGEPVTEAVITVPAYFNDSQRQATKDAGKIAGLEVKRIINEPTAAALAYGVDSKKGEQTVAVYDLGGGTFDISIIEIADVDGDNQIEVLSTNGDTFLGGEDFDLALMNYLIDEFKKEQGIDLHNDKLALQRVREAAEKAKVELSSAQQTDVNLPYITADATGPKHLNIKVTRAKFESLVSDLVMRSLEPCKKALEDAGLSKSDITEVLLVGGQTRMPLVQEKVKEFFGKEPRKDVNPDEAVAVGAAIQGGVLAGDVKDVLLLDVTPLSLGIETMGGVMTKLIERNTTIPTKKSQVFSTAEDNQPAVTIHVLQGEREMASANKSLGRFDLADIPPAPRGMPQIEVTFDIDANGILNVSAKDKATGKEQNIVIKSSSGLSEEDIEKMVQDAEANAEADKKFHDLVTARNTADNLIHSSRKAIQELGDKVTAAEKEKIEEACKELEAATKGDDKQAIEAKTKALEEAFAPIAQKAYAEQAQAAGAQGGAKAEEPKKEEDVVDADFEDVEDDKK

SEQ ID NO: 35272 - protein, 455 aa, Francisella tularensis subsp. holarctica
MDNNQDKLKRDILSRHIVMISLGGTISASFFLGIGSILNTVGAFGTVIGFFIGGIIMMLVMISLAEMAIEMPISGSFQSYATKFISPYSGFLTGWLYLLNWLTAAAGGLVAAGIICNNFYPAISVWQFCLAIILIVSLLNLCAVRVFAEIEFWLSAIKIITIIIFIIIGIGIIGGFLHSNKPIAGLVNFYVDGLFPNGFKAFLFGLVIIVCTFQGAEVVGIAAGETKEPEKNIRKAIRSVAVRILLFFVFSSFIIAYVIPYKDSGITNTPFVTVLQLVNIKYVDTIMQLVILSASLSAVNSCFYTCARLMWSMAEANQAPKIFAKISKKQIPIYGVVFVALLSCICLITKFIGAEKIFILVISSSGMVGCMIWIIISMCHIYFRKSLTASQIESLRFKAWGFPLIPYTSILFNSCVILAMFWDPEQRMVVYSGVILILLFSFLYKFYYKKIIVKT

SEQ ID NO: 35273 - protein, 249 aa, Francisella tularensis subsp. holarctica
MLLEIKDLHVSVGEQKKQILKGLNLTVKKGEVHAIMGPNGAGKSTLSNVLAGKDGYEITQGSITFDGKDLNDLSISERAAAGIFLSLQYPIEIPGVSNVQFLKTALNSIRKQNGEDEIDAISFMKKLKENMQVLKIDQKYMSRGVNEGFSGGEKKRNEMLQLMMLEPKLAILDETDSGLDIDALQVVSQGANSMRSADRSFLVITHYQRLLDHIQPDFVHVLADGKIVKIGGKELALELEEKGYSWLNS

SEQ ID NO: 35274 - protein, 67 aa, Francisella tularensis subsp. holarctica
MRQGTVKFFNTSKGFGFIEPQDGGKDVFVHISAVENAGLSSLRESEKVSFEVEENRGKMAAVNIKSI

SEQ ID NO: 35275 - protein, 569 aa, Francisella tularensis subsp. holarctica
MNSETKKDFSQLGLNQDIVDTVIKLGYENPTPIQQYAIPYILSGRDVLGQAQTGTGKTAAFALPLINNMDLASRDRAPQVLVLAPTRELAIQVAEQFEAFAKNVPNLDVACIYGGQEYGSQIRALKQGVKVVVGTTGRVMDHIEKGTLQLDNLRALVLDEADEMLRMGFIDDVQFVLSHVSEQCQRLLFSATIPTDIADIIEEYLRNPCKIQVKAKTKTANTVTQKFIVIKGFRKIDALDRLLETEETDGVIIFVKTKTSTIEVADNLKALGYKVAAINGDMQQSQREYIVDQFRSAKSDILVATDVVARGIDLERISHVINYDMPNDTDTYVHRIGRTGRAGREGTSISLVPLKEMRFLRTLERFTGSPMQEVFMPSAKDLAQSRVEHFKARIISALDKNKSLDKYKEIITSIRYELQLDSEELLAGLTLLAQGKKTFFPREIQAKEEKPARDNRNSRDGRRNERFERRNDQGDRTKRFDKADRKPRRAVNIDLTTYKLDVGRDNDVQARNIVGAIANEGNIDSKHICNISIQKDYTLVDLPANLSPKVINHLKKVWVAGKKLNLTAQ

SEQ ID NO: 35276 - protein, 323 aa, Francisella tularensis subsp. holarctica
MTSHINNAVETFRLEIETLEKLKNSIDENFEKACEIILENNRDKSRVIITGMGKSGHIGKKMAATFASTGTPAFFVHPGEAGHGDFGMITKNDVLIAISNSGTSSEIMGLLPMIKHLDIPIIAITSNPKSILARNSNVTLNLHVDKEACPLNLAPTSSTTATLVLGDALAIALLKAKNFSEKDFAFSHPNGALGRKLILKVENIMRKGNEIPIVKPTDNIRKAILEISDKGVGNTLVAENNTLLGIFTDGDLRRMFEAESFNSQRAISEVMTKNPKSISKEEMAITALEKMEKYEITSLAVVDNGHNILGIVTMHDLIKLELR

SEQ ID NO: 35277 - protein, 548 aa, Francisella tularensis subsp. holarctica
MTSEIKVNKTNFIKNIIKKDLETNKVSSILTRFPPEPNGYLHIGHAKSICLNFGIAQEFDGKCNLRFDDTNPDKEDIEYINAIQEDVEWLGFKWENQPRFASEYFDKMYELAILLIKKGKAYVCDLSAEEIRAYRGTLKEPGKNSPYRERSITENLELFEEMKNGKFAEGSKTLRAKIDMSSGNINLRDPALYRIKFSHHPKTGDKWCIYPMYTFAHPLEDAIEKITHSLCTLEFQDQRPFYDWVIEETEFSIKPQQIEFSRLNLNYTITSKRKLKYLVDNKLVNGWDDPRMPTIKGYRRRGYTPESIRNFCEMIGISKQDSVIDVSVLEDAIRDDLNKSVLRKNVVLDPIRVSIKDMPNHHLDVPNHPQDPEFGRREITISSQIFIERDDFVFKLEKDMKKLSPNGRVRLLNSYVIECQEVITDTSGEVIELKCSYLPETLGGKKPNDGIKPNGIIHWVDANNCLDAEVRIYDRLFNDENPANADRIEDVLNPDSLQVIKNAKVERSLESVKAEERFQFNRVGYFIADLKDCSNDTLVFNRIATLRN

SEQ ID NO: 35278 - protein, 609 aa, Francisella tularensis subsp. holarctica
MANMIDKIDLKSQGSSNLSGEMTNHQKVGTLYKRLLLQVKHLWHFLLLAAIGSIFFSAADASMIYLINPILNYGFGPGGGITKQSATILMLMGVGMVGLLALRSVGSFVSQYFIGSLGQKVVYKFRKDIYKRLMGLPASFFDKHSTGQIISRLLYNVDQVTEATSTAIITVVQDGTFVIGLIVVMFVSSWQLSLFLIVVGPFLGLFISIINKKFRNLSRNTQSSMGNVTHTAEETIRNYKEIRIFGAQQKQQNKFFKNLDYTYSQQIRTIALDALTSPVIQIIASLVLAFSLFTIAIFGTNEGDGSSWLTAGSFASFFAAAAAILKPIKNLTKVNVVIQKAVAATEDIFYILDYPAEKETGSKELAKVDGNVTIKDLSFAFGEHKVLSGVSVDIKAGQTVAFVGKSGSGKTTLTSIISRFYTQHEGEILLDGVDTRELTLENLRSHLSIVSQNVHLFDDTVYNNIAFGLSREVSEEEVIDALKRANAYEFVQELSDGINTNIGNNGSKLSGGQRQRISIARALLKNAPVLIFDEATSALDNESERVVQQALESLTKSCTTIVIAHRLSTVENADKIVVMDGGMVVESGKHQELLEQGGLYTRLYQSGLQ

SEQ ID NO: 35279 - protein, 334 aa, Francisella tularensis subsp. holarctica
MRFVDEVVIKLQAGKGGNGCVSFRREKYVPCGGPDGGDGGNGGSIYLKADENVNTLIDYRYKREYYAENGRPGEGRNCYGKAGEDLYLVVPVGTSVFDIDTNKKIGEVLQHGQTFKLVSGGKRGIGNTHFKSSTNQAPRKFTLGEEGEYKEVRLELNLLADVALLGLPNAGKSTLIRSVSEATPKVADYPFTTMYPHLGVVKVGVDSFVMADIPGVIEGAAEGAGLGLRFLKHLTRARCVLHVVDICPFNESDPVENYFAVEKELEKYSQELFDKLRFLVINKIDLLADKVEQKCQEFVEQIGYQGNYYTISAAMKKGTDELAKKLNEFLQKQE

SEQ ID NO: 35280 - protein, 345 aa, Francisella tularensis subsp. holarctica
MKVITAEYIWADGSDPVPHLRSKARVLPFKEFETPDEFPEWSFDGSSTNQATGDNSDCILKPVNFVIDPLRDYGYLVLCEVYNPDGQTPHATNNRAKLRALLASADCQDMWAGFEQEYTMFKDGRPLGWPTTGFPGPQGPYYCSAGNSKAFGRDLVEAHMQACLEAGILFYGINAEVMPGQWEFQIGYRGVDGEDAGILNVADHTHLARWLLERLGEEYGIDISFDNKPIKGDWNGAGLHTNFSTSKTRNPQTGREAIKKICAALEKNHKKDILNYGHNLHERLTGKLETSDMNTFSVGDADRGCSIRIPRPVALKGYGYLEDRRPGANADPYVIAMALANAAIN

SEQ ID NO: 35281 - protein, 155 aa, Brassica oleracea
MKKLEADDTKPPEPPKDYIHVRARRGQPADSHRFAERVRREKISEMLTLLQDLVPDSSRITGKADSLDEIINYVQSLKRQVELLYMKLATINPRMESNRNAALSIKVKENMLYAIACSEQRLPLGYYSLAQNMPRFSDTQFLSNYGFVQTKVISR

SEQ ID NO: 35282 - protein, 248 aa, Brassica oleracea
MGKEDLGLSLSLGFSQHNNPSSSISNNLHRFPWNQTLASTSDLRKIQVNTLPSTVDCEEEAGVSSPNSTISSTISGGKRSEREGTDEEEDAGGETSRKKLRLSKDQSAFLEETFKEHNTLNPKQKLALAKKLSMTARQVEVWFQNRRARTKLKQTEVDCEYLKRCVEKLTEENRRLQKEAMELRTLKLSPQFYGQMTPPTTLIMCPSCERVAGPSSNHHQTHRPVAINPWVPRAGQVAHGLDFEALRS

SEQ ID NO: 35283 - protein, 240 aa, Brassica oleracea
MYGQGEIMAATETEYAVLESIRRHLLGGETELQFSESIPSSCFTESWGDLPLKENDSEDMLVYGVLNDAFNRAACETSSPSSDLSCLSDFLDKPPANPSHNDFPAVKMEPAENLAAVAEKPKEVAPPAKGKHYRGVRQRPWGKFAAEIRDPAKFGARVWLGTFEKAEDAALAYDRAAFRMRGSRALLNFPWRVNSGEPDPVRIPSKRSYTSSSSSDNGTPKRRRNTEEVPSELQVKCEVA

SEQ ID NO: 35284 - protein, 218 aa, Brassica oleracea
MWMMISQEGQRSNPIIYHNNIHLLCEVDQKREKASVIVLKIQTKHPNPESFKTSLEPSPPLSPHSLCIRWKPYSNSSEFQANASVLLILFVSALICGLSLCAAIRCFLRPNLQTDDNEHKPDPEEDVSSTVPTPTLVYSSDLELAGAQAECAICLSEFEPGESIHVLEKCHHGFHIKCIHKWLSSRSSCPTCRTSIFSQNTLDSATSAVAPSTNEINA

SEQ ID NO: 35285 - protein, 274 aa, Brassica oleracea
MMMRKEDLGLSLSLGLSQDHTPLQSQNPNSSISNNLHRFPWNQTFASTSDLGKIDVNSLPRTVDCEEEPGVSSPNSTISSTISGGKRSEREGISEHDEITPDRGYSRGNSDEEEDGGETSRKKLRLSKDQSAFLEGTFKEHNTLNPKQKLALAKKLNLTARQVEVWFQNRRARTKLKQTEVDCEYLKRCVEKLTEENRRLQKEAMELRTLKLSPQFYGQMTPPTTLIMCPSCERVAGPSSNHQHNHRPVPVNPWVACAGQVTHGLNFEALRPRS

SEQ ID NO: 35286 - protein, 587 aa, Brassica oleracea
MEMESCKLFIGGISWETTEDRLREYFQSFGEVLEAVIMKDRATGRARGFGFLVFSDPIVAERVVFLRHVIDGKLVEAKKAVPRDDHVVLNKSYNTSLQGSPGPANSKKIFVGGLASSVTEAEFKKYFAQFGVITDVVVMYDHRTQRPRGFGFISFESEDAVDKVLQRTFHELNGKMVEVKLAVPKEMALNPIRNQMNVNSFGSSRISALLMNEYTQGFSPSPISGYGVKPEVRYSPGLGNRGGGFSPFGHGYGIELNFEPDQSQNFGSGSSAGFGRPLSPGYAPSLGRYGSQIESGGAGNGPVLNAATKNHLWGNGGGLGYMSNSPISRSSFNGMSSLGSIGDNSRRNSYRSEGGGGLGLEAMRGGHVGGYSSGSSSLETDSLYSDSAWLSLPAKAEERMGAFDFMSRGPAGYINRQPNGEVAAASPLSSASSECNSNSCRWKPYSNSTDFQANASVLLILIFSSLICALSLCAAIRCFLRPTTPETDDNDHKSDLEADSSFTIPTPTLVYSSDLELAGAEAECAICLSEFEQGESIQVLEKCHHGFHVKCIHKWLSSRSSCPTCRTSIFLQSTLDSTPSTEAPSTN

SEQ ID NO: 35287 - protein, 232 aa, Brassica oleracea
MYGQSEVESDYALLESIRRHLLGGEAELRFAESIPSSCFTESWGDLPLKENDSEDMLVYGLLNDPYDTSSPSSDLSCITEFVDLETSSKRPSDSPVAKAEPAESFAAATVEKQKAATAKGKHYRGVRQRPWGKFAAEIRDPAKNGARVWLGTFETAEDAAFAYDRAAFRMRGSRALLNFPLRVNSGEPDPVRITSKRSYTSSSSSSSENRKLKRRRKTENVPSEFQVKCEVV

SEQ ID NO: 35288 - protein, 273 aa, Brassica oleracea
MGKDDLGLSLSLGFAQNQHPLQLNLKPTSSPMSNHQMFPWNQTFVSSSNHQNHQSLRKIDVNSFPSTVELEEETGVSSPNSTISSTVSGKRRSERQGSGDDLDIALDRSSSRGTSDEEEEYGGEACRKKLRLSKDQSAVLEDTFKEHNTLNPKQKLALAKKLGLTARQVEVWFQNRRARTKLKQTEVDCEYLKRCVEKLTEENRRLEKEAAELRALKLSPGLYGKMSPPTTLLMCPSCERVGGPSNHSQRSVSLNPWLQMAHGSTFDVKHPRS

SEQ ID NO: 35289 - protein, 277 aa, Brassica oleracea
MGKEDLSLSLSLGFAQTHHPLKLNLNPTSSSISNLQMFPWNQTFVSSSDHQNQQFFTKIDVNSLPSTVHLEEETGFSSPNSTISSTVSGKRRSEREGTSGGAGDDLDVTLDRSSSRGTSDEEEEHGGEACRKKLRLSKDQSAVLEDTFKEHNTLNPKQKLALAKKLGLTARQVEVWFQNRRARTKLKQTEVDCEYLKRCVEKLTEENRRLEKEAVELRALKLSPRLYGHMSPPTTLLMCPSCERVAGPSNHNQRSVSLSPWLQMAHGSTFDVVHPRS

SEQ ID NO: 35290 - protein, 337 aa, Brassica oleracea
MGRSPCCDQDKGVKKGPWMPEEDYKLVAYIDKNGYGKWRSLPNIAGLNRCGKSCRLRWMNYLRPDIRRGEFTEEEESTVVKLHALLGNKWSKIASHLPGRTDNEIKNYWNTHMRKKMLQMGIDPITHEPKTNDLSPILDVSQMLAAAIGNGQFGNNTLFNNNIAVEDLLKLQLIHKMLQIITPKAMPNTNSFNTNSLDTKPVANNIKTNPVNPKPEQAAGQLNAIDPHVFTSQIENEDFMPSFEDAWDCFGDNQLPGLVMVSQENLNYQTGAGMMPDYYGDQLREVPSTGSISVTPETSGLNYPGTTQHSSGSNVQEDWEKFLDDETSDSCWKSFLE

SEQ ID NO: 35291 - protein, 548 aa, Capsicum annuum
MAASSFSFPTSSSFMTTSFTDLLASSDDYPITKGLGDRIAERTGSGVPKFKSLPPPSLPLSPPPFSPSSYFAIPPGLSPTELLDSPVLLSSSNVLPSPTTGSFPAQAFNWKSSSNNQDVKQEEKNCSDFSFQTQVGTAASISQSQTSHVSLGQQAWNYQEPTKQDGLSSDQNANGRSEFNTMQSFMQNNDHSNSGNGYNQSIREQKRSDDGYNWRKYGQKQVKGSENPRSYYKCTYPNCPTKKKVERSLDGQITEIVFKGNHNHPKPQATRRSSSSTASSAIQSYNTQTNEIPDHQSYGSNGTGQIDSVATPENSSISFGDDDHEHTSQKSRSRGDDLDEEEPDSKRWKRESESEGLSALGSRTVREPRVVVQTTSDIDILDDGYRWRKYGQKVVKGNPNPRSYYKCTSPGCPVRKHVERASQDIKSVITTYEGKHNHDVPAARGSGNHSINRPIAPTITNNNSAMAIRPSVTSHQSNYQVPMQSIRPQQFEMRAPFTLEMLQKPNNYGFSGYANSEDSYENQLQDNNGFSRAKNEPRDDMFMESLLC

SEQ ID NO: 35292 - protein, 224 aa, Arabidopsis lyrata
MRIRRREEKENQEYKKGLWTVEEDNILMDYVLNHGTGQWNRIVRKTGLKRCGKSCRLRWMNYLSPNVNKGNFTEQEEDLIIRLHKLLGNRWSLIAKRVPGRTDNQVKNYWNTHLSKKLVGDYSSAVKTTGEDDDSLPSLFITAATTSSRHHQQENVYENIAKSFDGVVSASYEDKPKQELAQNDVLMATTNDPSHYYGNNALWVHDDDFELSSLFTRNDEFCFW

SEQ ID NO: 35293 - protein, 249 aa, Diospyros kaki
MGRGRVELKRIENKINRQVTFAKRRNGLLKKAYELSVLCDAEVALIIFSNRGKLYEFSSINNMPKTLERYQKCSYGTLEDNRSAKEMEQNSYREYLKLKAKYEELQHFQRHLLGEDLGPLNLKDLEHLEHQLETSLKQIRSTKTQSMLDQLCDLQNKEKMWIEANKALERKLDEIYRENQLQSSWGGGGGEQGNSSFNHHHHHPHSQAFFHPFDCNPTLQIGYPEVSNQMGTAATHEQNMNGLVPEWML

SEQ ID NO: 35294 - protein, 277 aa, Capsicum chinense
VISRMVLGKRYLDESKNSIVTPEEFKKMLDELFLLNGVLNIGDSIPWLGFMDLQGYVKRMKVLSKKFDKFLEHVLDEHNVRRKAVENYVAKDMVDVLLQLADDPSLEIKLERHGVKAFTQDLLAGGTESSAVTVEWAISELLKRPDIIKKATEELDRVIGQNRWVQEKDIPNLPYIEAVVKETMRLHPVAPMLVPRECREDCKVAGYDVQKGTRVLVSVWTIGRDPTLWDEPEAFKPERFLEKSIDVKGHDFELLPFGAGRRMCPGYSLGLKVIQAS

SEQ ID NO: 35295 - protein, 956 aa, Ustilago hordei
MSRPKTAQLRPATSAGQLNSSIRPATTGGFGIEHERESHGEQEGSYDSKEYTDTEDDDDKVGQHQAEDDDVFAFAPPGLEVPGVQVVAAPSSLPARPPTALTSGDPLRSGQRSNIPRESIYYLDQESGAVYDAQGNLVQSEDPVNIDLHAESLRDDQQHSGGIAEKVPQGVRRTTSIKWHPPTRDESSNWQRRCNSVGRKSDGPYSPTSSSHAAAPWGGQPGNVTPTCDSADLLRQLPRPSMSRTVELELEEDDDSPYPEVRASVSNLDDSTMPSITFRSVLLGLGLSAFASAVNTFLSQRNPPIQIVAIIIQILAHPLGMILANILPIRSFYFRPPSLRKVNSAKRASRSHAWSFNPGPWNIKEHTVVLVAATTGLNPSYSLSILLAQDLARFWDDRRSFLYGFLSVCAPQLIGLALAGFVRAVLVDPASMIWPQNLAVSTVLNTLHADEDSLSERRSSRMSRLRCFNIASAVAFVAYFLPGYLFTALSIFNWICWIWPNSVPVNVVFGAANGLGASVLTFDWTQIVYLGSPLITPWWAQTNLFGGFVVGIWIAAPILYFTNMLYTAYLPILSGSSFDRFGQRYNVSIVSPDHITLRADAYADYSRVYISAGLVVAYFGGFALITAAVVHTALYHGRFVLDRLRARRTMPDDVHARLMRKYPSVPSWWYVAVLISGLGMSMLLTTAYGTGLPIWALCLAILIPVAYMLPFGFIFAMSGLPAGVNLVSELLASWLLPGKPLPVMMFKTISQQTTTFGLLFSQDQKLAHYMKIAPRNIFFVQILSITVNSIVQILAKDYLRDHIEGLCDPNQPQRFTCPTVNIFYTASIIWGAIGVERSFGPGSPYNSLFYGLIVGAVLPLITWYTSRKLNWSTMRYISAPIIFVGMSLAPPASGINFTSAIVVGYFFQYWLRKHRLEWWSRYNFVFAGALDFGSVMSVSTQTSFPPFEVMRREMVG

SEQ ID NO: 35296 - protein, 1312 aa, Ustilago hordei
MPRRGNLGGHRVVIASLFLPDTLHFVEPEFESALAESPQESTAPPSPDSLPHDAPLPLHELSSRLAASMSMSAQDRQTRSMPVAAKTPMNRQSSLTDTKINMSELMYEAAAVPKLDMREGPISGASSPLTRSRRGSMSEHPAADIPVAPASDHGRAAMTPDLNPLSVFSTSPLPGQTASITAAPKSRRSSFNTNTSSGTALAPAANVPEGTGTRTPGARAGGKLGITTPLSIISDLAARRGGPIPSLATTADSERHHPFGSGAVTPIAGAQTPGNANRPPGLARAFPSSLSMTKANPSGSVSAGPGALPTLKSLAAAKQVNTASGSRTPSGSSGLHGAKTASAVSSGSINDHGRGAAPTSAPNQARKASIPTAEKPSSRELLGHARTPREHSISSSLTASIKGRAHHHGGGAHSSGNQGPPAAPSSVFSRNHSIRSAPRRGSGRRASSASRSQLGRHTSTASLDTVMDDDADAALPPFDFVSNPSANGGLINAVRSIERERLRAGKVYVGTPGLSTEGWLGPSEKRILEQKYLKERSSMPVWLADDDFDLSYNRFCKQILWPTFHYTSPTSKGLDNEHEAFRAYWEVNRRFADAIEDIYQEGDIVWINDYHLLLVPQMVRERLPHATIGLFVHIAFPSSEIFRCLSMRETLLKGMLGADLIGFQTHNFCRHFRQTVSRILQLEATPKGVQLEGSFVTVAPFPIGIDVRSLNAKRQDPEVSEWVAQLRQKYAGKRIIVGRDKLDWIKGVRQKLLAFEAFLDENPMWAGEVVLIQVALATTEENEEIGEATDVVSRINNKYSSLTYQPVVFLHVQDITFSQYLALLTVADCFLATSLREGMNLTSHEFVVCQEVSHRPLVLSEFTGTYSGLRACIGINPWNTKQVAHAIHKALIMDESEMVQRWTDLHRVVVTQTAQQWITSLLGHLERAHMEQERLENMFVPKLEVAQLVSEWRAAHARLLLIDLEETLVTYDPLLAHEQGGFRPPEWLFTLLNDLAADNKNVVYILSGMGTNDLDRLASRIDSVGFAAEDGCFVKHAGEHHWNSLVAPFDLRPVRDILSYFTERTPGSYIEERSASMCWRFWNDKLGDRDSHEAQWARRQSAEVANLIHERFSHSLRVVPCRTNCLILPRHASRVAAVQHIIMQMSIIGSVAMSGGNASSQPSSASTPSLSAQKPNDITQRLADQPHHPPLESAYKQPSNYWTMPSAHNTRASSPVVHQSPMRSHAGLVSHHLPHHFHQTHTFDFVLALGQDEKLLAYVNTLDLFAPVTCTTVDLEKNRGTEAAYFLAQSEVQEALEEMVGFRARDLKWANR

SEQ ID NO: 35297 - protein, 338 aa, Brassica oleracea
MGRSPCCDQDKGVKKGPWVPEEDDKLTAYIEKNGYGNWRSLPKLAGLNRCGKSCRLRWMNYLRPDIRRGEFSDEEESTIVRLHALLGNKWSKIASHLPGRTDNEIKNYWNTHMRKKMLQMGIDPITHEPRTNDLSPILDVSQILAAAIGNGQFGNSNLINNNTALEDLLKLQLIHKMLQIITPKAIPNITSFTTNSLNPKLDSVVNSFTTNSVNPKPEQAAIQLNANEPHDFINQSANEDFMMPPFENIWDGFEDNQLPGLVTVSQKNLNSGTGMMPGYYGDQLSEIPSNGSISVSPETSGLNYPGTTQHLTGSDVLEDWEKFLDDETSHSCWKSFLE

SEQ ID NO: 35298 - protein, 498 aa, Streptomyces fungicidicus
MTSPLFRTKKVEQSIRDTEEPEHALKKSLSALDLTVFGVGVIIGTGIFVLTGTVAKDNAGPATALAFVVAGVVCALAALCYAEFASTVPVAGSAYTFSYASLGELPAWIIGWDLVLEFALGTAVVAVGWSGYIQSLLSNAGWEMPAALGSREGADVFGFDILAAALVLVLTGILVLGMKLSARVTSVVVAIKVTVVLVVIVAGAFFITADNYDPFIPKSEPVPAGDSLASPLIQLMFGWAPANFGVMGIFTAASVVFFAFIGFDIVATAAEETKNPQRDMPRGILGSLLICTVLYVLVSLVVTGMQHYSELSVDAPLADAFKATGHPWFAGFISFGAAVGLTTVCMILLLGQTRVFFAMSRDGLLPRFFSRVHPRFRTPYRPTILLGVAIAILAGFTPLNELAALVNIGTLFAFVIVAISVIILRRTRPDLPRAFRTPWVPVLPIVSVAASLWLMLNLPAETWVRFGIWMAVGVVVYFLYSRKHSRLAEERGGERTSS

SEQ ID NO: 35299 - protein, 651 aa, Streptomyces fungicidicus
MTVGHDPTMGTIGLRVEGLVDPQPVRSGTFKRIIPYAMRYRRAMAMVMVATIVDSLITVSIPLTLKMIIDDGIIPGKTSVVFGLAGLVAGLALLNVVAVYTQTWFSGRVGQGLIFDLRTAVFSHIQRQPVAFFTRTQTGSLVSRINTDIVGAQQALTSLLSQSLSTLLTLVLVLAAMLYLSWPITVAALIMIPLFFIPGKIIAQRLEKLARAGMQNDAKLGSMMTERFNISGAMLVKLYGRPEDESAEFSKKAGLVRDIAISMDVHARLLFILVTLLTTVTTAMVYGFGGWFVIDGSLQIGTLVAMVALLLMLYGPVNQLTNIQSDVMTALVSFDRVFEVLDLKPLITERPGARPLPARASANGDGTAPPVEFDQVAFRYPSAEEVSLPSLELMPQRKSEQGPGALVLNDVSFHAPAGRLTALVGPSGAGKTTITHLVPRLYDATSGTVRIGGHDVRDLTLGSLQNTVGVVTQDAHLFHDTIRANLLYARPDASEPEIVQACEAARIWPTISQLPDGLDTVVGDRGYRLSGGEKQRLAIARLLLKSPPIVVLDEATAHLDSESELAIQRALKTALTGRTSLVIAHRLSTIQDADQILVIDDGRIQERGTHDQLLAGGGLYSELYRTQFAHQQGRGRPAESTAAGNGNRALD

SEQ ID NO: 35300 - protein, 243 aa, Ipomoea batatas
MGRGRVELKRIENKISRQVTFSKRRSGPLKKAHEISVLCDAEVGLIVFSTKGKLFEYSTDSSMENILDRYERYSYAEQRMTTNVSEQQQNWPCQYPKLVSRIELLQRSTRNFLGDDLEPLGLRELQSLEQQLDTGLKRIRTRKNQLMHESISELQKKERALQVQNNILAKQVELEQQKLVLNSASTSMPSQPLVSPLPLPNLTIGSIARATEAAKNSENRGQALPCSTSLVPPWMLRHPNNKD

SEQ ID NO: 35301 - protein, 159 aa, Gymnadenia conopsea
MSDEEHHFESKGDAGASKTYPQQAGTIRKNGYIVIKGRPCKVVEVSTSKTGKHGHAKCHFVAIDIFTAKKLEDIVPSSHNCDVPHVNRTDYQLIDISSDGFLSLLTENGNTKDDLRLPTEDALLSQIKEGFGEGKDLVLSVMSAMGEEQICGVKDIGHK

SEQ ID NO: 35302 - protein, 234 aa, Litchi chinensis
DCFVDGCDGSLLLDDTSTFVGEKTAVPNNNSVRGFNVVDQIKAKLEKACPGVVSCADLLAIAARDSVVHLGGPSWTVRLGRRDSKTASRALANTSIPPPTSNLSALISSFSAQGLSLKDLVALSGAHTIGLARCTSFRGHIYNDTNIDSSFAMSLRRKCPRSGNDNALANLDRQTPFCFDKLYYDNLLKKKGLLHSDQELFKGGSADPFVKKYANNTSAFFKDFAGASGQDEQT

SEQ ID NO: 35303 - protein, 352 aa, Daucus carota
MASLTDLINLDLSDTTDKFIAEYIWIDAVGGLRSKARTLSGPVDDPTKLPKWNFDGSSTGQGPGDDSEVIIYPQAIFKDPFRRGNHILVMCDTYTPAGEPIPTNKRCNAAKIFSHPDVAAEVPWFGIEQEYTLLKKEVNCPIGCPTGGYPGPQGPYYCGIGADKAFGRDIVDAHYKACLYAGINISGINGEVMPGQWEFQVGPAVGISAGDELWVARYILERITEIAGVVVSLDPKPIPGDWNGAGAHTNYSTKSMRNEGGFEIIKKAIAKLETKHAQHIAAYGEGNERRLTGKHETASIHKFSWGVANRGASVRVGRDTEKEGKGYFEDRRPASNMEPYVVTSMIAETTIL

SEQ ID NO: 35304 - protein, 432 aa, Daucus carota
MAQILAPSVQWQMRFTKNSTEVSSMTSKMWGSLFLKQNKKAPARSSTKYRALAVKSEDGTINRMEDLLNLDVTPYTDKIIAEYIWIGGTGIDVRSKSRTISKPVEHPSELPKWNYDGSSTGQAPGDDSEVILYPQAIFKDPFRGGNNILVICDTYTPQGEPIPTNKRHKAAQIFSDAKVLGEVPWFGIEQEYTLMQQDVNWPLGWNVGGYPGPQGPYYCAAGADKSFGRDISDAHYKACLYAGINISGTNGEVMPGQWEFQVGPSVGIEAGDHIWCARYLLERITEQAGVVLTLDPKPIDGDWNGAGCHTNYSTKSMREEGGFEVIKKAILNLSLRHKEHISAYGEGNERRLTGKHETASIDSFSWGVADRGCSIRVGRDTEKEGKGYLEDRRPASNMDPYVVTGLLAETTLLWEPTLEAEALAAQKLSLNV

SEQ ID NO: 35305 - protein, 608 aa, Orobanche densiflora
SGKPFYAIIHRVTGSLIIDFEPVKPHEVPMTAAGALQSYKLAAKAIACLQALPGGSMERLCDTMVQQVFELTGYDRVMIYKFHEDDHGEVFTEITKPGLEPYVGLHYPATDISQAARFLFMKNKVRMICDCRANHVKVVQDDNLPFDLALCGSTLRAPHGCHLQYMENMNPIASLVMSVVVSEGDEDGPNSSSSLDKRKRLWGLVVCHNTCPRFIPFPLRYACEFLVQVFSIHVNKELELKNQMLEKNILHTQTLLCDLLLRDVPLGIVSQSPNVMDLVKCDGAILLHKRTKYRLGLTPTDFQIRDIVSWLDEYHQDSTGLSTDSLYDAGFPGALALGHALCGMAAVKITDEDWLFWFRSHTAAEIRWGGAKHELGEKDDGKKMHPRSSFRAFLEVVKTRSLPWKDYEMDGIHSLQLILRNAYKESEEKDLESREIHARLNELQIGGVKEIEAVTSEMVRLIETATAPIFSVGLDGLVNGWNTKISDLTGLNVDEAIGMHFLALVEDSSADTVSKMLGLALQGKEEHDVQFEVKTHGQRRESGPISLIVNACASRDVNENVVGVCFIAQDITTQKSMMDKFTRIEGDYQSIIQNPNPLIPPIFGTDEF

SEQ ID NO: 35306 - protein, 611 aa, Orobanche fasciculata
SGKPFYAIIHRVTGSLIIDFEPVKPHEVPMTAAGALQSYKLAAKAITRLQALPSGSVKRLCNTMVQEVFELTGYDRVMVYKFHDDDHGEVFAEITKPGLDPYVGLHYPATDIPQAARFLFMKNKVRMICDCKAYHVKVVQDDNLPFDLTLCGSTLRAPHSCHLQYMENMNSIASLVMSVVVNEGDEDVPDSSSGPDKRKRLWGLVVCHNTSPRFVPFPLRHACEFLTQVFAVHVTKEWELENQLLEKNILRTQTLLCDLLLRDSPLGIISGSPNVMDLVRCDGAVLLHKNTIYRLGQTPTDLQIRDIVSWLDEYHRDSTGLSTDSLYDAGFPGALALGNAVCGMTAAKVTDKDWIFWFRSHTAAEVHWSGAKHEPGEKDDGRKMHPRSSFKAFLEVVKTRSLPWKDYEMDAIHSLQLILRNASIENVEKESEGGETHARLNELQLNGVKEIEAVTSEMVRLIETASVPIFAVDLDGLVNGWNTKIADLTGLGVNEAIGRHFLALVEDSSADTVSKMLDLAMQGKEEQNVQFEIKTHGRRSESGPITLIVNACASRDVQENVVGVCFIAHDITTQKSMMDKFTRIEGDYRSIIQSPNPLIPPIFGTDEYGWN

SEQ ID NO: 35307 - protein, 383 aa, Orobanche gracilis
DFEPAKPHEVPMTSAGALQSYKLAAKAIACLQALPGGSMERLCDTMVQQVFELTGYDRVMIYRFHEDDHGEVFTEITKPGLEPYVGLHYPATDIPQAARFLFMKNKVRMICDCRANHVKVVQDDNLTFHLTLCGSTLRAPHGCHLQYMENMNSITSLVMSVVVSEGDERWAQFFFGPGQEKKTLGLVVCHNTCPRFIPFPLRYACEFLVQVFSIHVNKELELENQMLEKNILHTQTLLCDVPLGIVSQSPNVMDLVKCDGAILLHERTKYRLGITPTDFQIRDIVSWLDEYHQDSTGLSTDSLYDAGFPGALALGHALCGMAAVKITDEDWLFWFRSHTAAEIRWGGAKHELGEKDDGRKMHPRSSFRAFLEVVKTRSLPWKD

SEQ ID NO: 35308 - protein, 456 aa, Orobanche pinorum
SGKPFYAIIHRVTGSLIIDFEPVNPHEVPMTAAGALQSYKLAAKAITRLQALPSGSVKRLCDTMVQEVFELTGYDRVMVYKFHDDDHGEVFSEITKPVLEPYVGLHYPATDIPQAARFLFMKNKVRMICDCLANHVKVVQDDNLRFDLTLCGSTLRAPHSCHLQYMENMNSIASLVMSVVVNEGDEDGPDSSSGPNKRERLWGLVVCHNTSPRFVPFPLRYACEFLAQVFAVHVTKELEWENQLLEKNILRTQTLLCDLLLRNTPLGIVSGSPNVMDLVRCDGAVLLHKNTKYRLGLTPTDLQIRDIVSWLDEYHRDSTGLGTDSLYDAGFPGALALGNAVCGMTAARVTDKDWLFWFRSHTAGEVRWSGAKHEPVEKDDGRKMHPRSSFKAFLEVVKTRSLPWRDYEMDAIHSLQLILRNASRENDEKDLEGREIQARLNVLQIDGVKEIEAVTS

SEQ ID NO: 35309 - protein, 584 aa, Orobanche raddeana
PYEVPMTAAGALQSYKLAAKAIACLQALPGGSMERLCDTMVQQVFELTGYDRVMIYKFHEDDHGEVFTEITKPGLEPYVGLHYPATDIPQAARFLFMKNKVRMICDCRANHVKVVQDDNFPFDLTLCGSTLRAPHGCHSQYMENMNSIASLVMSVVVNEGDEDGPDSSSGPDKRKRLWGLVVCHNTCPRFIPFPLRYACEFLVQVFSIHVNKELELESQMLEKNILRTQTLLCDLLLRDVPLGIVSQSPNVMDLVKCDGAILLHKRTKYRLGLTPTDFQIRDIPSWLDEYHQDSTGLSTDSLYDAGFPGALALGHALCGMAAVKITDEDWLFWFRSHTAAEIRWGGAKHELEEKDDGRKMHPRSSFRAFLEVVKTRSLPWKDYEMDGIHSLQLILRNAYKESEEKDLESREIHAKLNELQIDGVKEIEVLTSEMVRLIETATVPIFSVGVDGLVNGWNTKISDLTGLSVDEAIGMHFLALVEDSSADTVSKMLGLALQGKEEHDVQFEIKTHGTRSESGPISLIVNACASRDVKENVVGVCFIAQDITTQKSMMDKFTRIEGDYRSIIQNPNPLIPPIFGTDEF

SEQ ID NO: 35310 - protein, 609 aa, Orthocarpus bracteosus
SGKPFYAIIHRVTGSMIIDFEPVKPHEVPMTAAGALQSYKLAAKAITRLQALSSGSMEQLCGMMVQEVFELTGYDRVMIYKFHDDDHGEVLSEITKPGLDPYVGLHYPATDIPQAARFLFIKNKVRMICDCRANHVKVIQDDNLPFDLTLCGSTLRAPHSCHLQYMENMNSIASLVMSVVVNEGNEDGPDSSSHPDEKKRLWGLVVCHNTSPRFVPFPLRYACEFLAQVFAIHVNKEIELKNQMLEKNILRTQTLLCDMLLRDAPLGIVSQSPNVMDLVKCDGAVLIYKTKKYRLGKTPSDFQIRDIVSWLDEYHRDSTGLSTDSLYDAGFPGALALGDAVCGMAAVRITNTDWLFWFRSHTAAEIRWGGAKHELGEKDDGRKMHPRLSFKAFLEVVKTRSLPWKDFEMDAIHSLQLILRNASNKKAEERDVEGKEIHARLNDLQLDGVQELEAVTSEMVRLIETASVSIFAVDVDGLVNGWNTKIADLTGLPVDKAIGKHFLALVEDSSAEVVNKMLELALQGNEEQNVLFEIKTHDLRSESGPISLIVNACASWDVKGNVVGVCFVAQDITIQKSMMGKFTRIEGDYRAIVQNPNQLIPPIFGTDEF

SEQ ID NO: 35311 - protein, 610 aa, Parentucellia viscosa
SGKPFYAIIHRVTASLIVDFEPVKPHEVPMTAAGALQSYKLASKAISRLQSLPSGSMERLCETMVQEVFELTGYDRVMIYKFHDDDHGEVLTEITKPGLEPYVGLHYPATDIPQAARFLFMRNKVRMICDCRANHVRVIQDQNLPLDLTLCGSTLRAPHSCHLQYMENMNSIASLVMSVVVNEGNEEAGPDELSQHLKRRLWGLVVCHNTSPRFVPFPLRYACEFLAQVFAIHVNKELELENQMLEKNILRTQTLLCDMLLRDAPLGIVSQSPNVMDLVKCDGAILLHKDQKHRLGITPSDFQIRDIVSWLDEYHRDSTGLSTDSLYDAGFPGALALGDIVCGMAAVRITDRDWLFWFRSHTASEIRWGGAKHELGERDDGRKMHPRSSFKAFLEVVKTRSLPWKDFEMDAIHSLQLILRNASSKEMEERKDLEGVEIQARLNELQIDGVQELEAVTSEMVRLIETASVPILAVGVDGLVNGWDTKIADLTGLPVDKAIGVHFLSLVEESSTEAVGKMLELALEGKEEQNVHFEIKNHGPNSDSSPISLIVNACSSRDVRENVVGVCFIAQDITTQKSVMDKFTRIEGDYRAIVQNPNPVIPPIFGTDEF

SEQ ID NO: 35312 - protein, 607 aa, Paulownia tomentosa
SGKPFYAIIHRVTGSLIVDFEPVKPHEVPMTAAGALQSYKLAAKAITRLQSLPSGSMERLCDTMVQEVFELTGYDRVMIYKFHDDDHGEVFTEITKPGLEPYAGLHYPATDIPQAARFLSMKNKVRMICDCRANHVKVVQDENLPFDLTLCGSTLRAPHSCHLQYMENMNSIASLVMSAVVNEGDEEGSDSSHPEKRKRLWGLVVCHNTTPRFVPFPLRYACEFLAQVFAIHVNKELELENQMLEKNILRTQTLLCDMLLRDAPLGIVSQSPNVMDLVKCDGAALLYKNKKYRLGLTPSDFQIRDIVSWLDEYHRDSTGLSTDSLYDAGFPGALALGDAVCGMAAVRITDKDWLFWFRSHTAAEIRWGGAKHEPGGKDDGRKMHPRSSFKAFLEVVKTRSLPWKDYEMDAIHSLQLILRNAFKEAEDTDLGSKAIHTRLNDLQIEGIQELEAVTSEMVRLIETASVPILAVDVDGLVNGWNTKIADLTGLPVDKAIGRHFLALVEDSSADTVSKMLELALQGKEERNVQFEIKTHGPRSESGPISLVVNACASRDVKENVVGVCFIAQDITAQKSMMDKFTRIEGDYRAIVQNPNPLIPPIFGTDEF

SEQ ID NO: 35313 - protein, 612 aa, Pedicularis densispica
SGKPFYAIVHRVTGSLIVDFEPVKPHDVPMTAAGALQSYKLAAKAITRLQALSSGSLERLCDTMSQEVFELTGYDRVMIYKFHEDDHGEVLSEITKPGLEPYLGLHYPATDIPQAARFLFMKNKVRMICDCRANHVRVIQDDNLHFDLTLCGSTLRAPHSCHLQYMENMNSIASLVMSVVINEGNEDEPESSSSSSHPDKRKRLWGLVVCHNTTPRFVPFPLRYACEFLVQVFAIHVSKEIELENQTLEKNILRTQTLLCDLLLRDAPLGIVSKSPNVMDLVKCNGAILIHKTKKYRLGMTPSDFQIRDIVSWLDEYHRDSTGLSTDSLYDAGFPGALALGDAVCGMAAVRITDKDWLFWFRSHTASEIRWGGAKHEPDDKDDGRKMHPRSSFKAFLEVVKTRSLPWKDFEMDAIHSLQLILRNASNKEAEASDVKGKEIHARLNGLQLDGMQELDAVTSEMVRLIETASVPIFAVGADGLVNGWNTKIADLTGLPVDRATGSHFVSLVDDSSVEAVKKMLELALQGNEEQNVQFEFKTHGPRSESGPVSLVVNACASRDLKENIVGVCFIAQDITTQKSMMDKFTRIEGDYRAIVQNPNQLIPPIFGSDEF

SEQ ID NO: 35314 - protein, 611 aa, Pedicularis foliosa
SGKPFYAIIHRVTGSLIVDFEPVKPHEVPMTAAGALQSYKLAAKAITRLQALPSGSLERLCDTMVQEVFELTGYDRVMIYKFHDDDHGEVLSEITKPGLEPYVGLHYPATDIPQAARFLFMKNKVRMICDCRANHVRVIQDDNLPFDLTLCGSTLRAPHSCHLQYMENMNSIASLVMSVVVNEGNEDGPDSSSSSHPDKKKRLWGLVVCHNTSPRFVPFPLRYACEFLAQVFAIHVNKEFELENQTLEKNILRTQTLLCDMLLRDAPLGIVSKSPNVMDLVKCNGAILIHKTKKYRLGMTPSDFQIRDIVSWLDEYHRDSTGLSTDSLYDAGLPGALALGDAVCGMAAVRITDEDWLFWFRSHTAAEIRWGGAKHEPGEKDDGRKMHPRSSFKAFLEVVKTRSLPWKDFEMDAIHSLQLVLRNASNKEAEERDTNGKEIHAGLNDLQLDGIQELEAVTSEMVRLIETASVPIFAVGVDGLVNGWNTKIADLTGLPVDKAMGSHFVALVDDSSAEAVNRMLELALQGNEEQNVQFEFKTHGPRSESGPVSLVVNACASRDVKENIVGVCFIAQDITTQKSMMDKFTRIEGDYRAIVQNPNQLIPPIFGTDEF

SEQ ID NO: 35315 - protein, 612 aa, Pedicularis gyrorhyncha
SGKPFYAIVHRVTGSLIVDFEPVKPHDVPMTAAGALQSYKLAAKAITRLQALSSGSLERLCDTMAQEVFELTGYDRVMIYKFHEDDHGEVLSEITKPGLEPYVGLHYPATDIPQAARFLFMKNKVRMICDCRANHVRVIQDDNLHFDLTLCGSTLRAPHSCHLQYMENTNSIASLVMSVVINEGNEDGPESSSSSSHPDKKKRLWGLVVCHNTSPRFVPFPLRYACEFLVQVFAIHVNKEIELENQTLEKNILRTQTLLCDLLLRDAPLGIVSRSPNVMDLVKCNGAILIHKTKKYRLGTTPSDFQIRDIVSWLDEYHRDSTGLSTDSLYDAGFPGALALGDAVCGMAAVRITDKDWLFWFRSHTASEIRWGGAKHEPDEKDDGRKMHPRSSFKAFLEVVKTRSLPWKDFEMDAIHSLQLILRNASNKEAEASDVNGKEIHARLNVLQLDGMQELDAVTSEMVRLIETASVPIFAVGADGLVNGWNTKIADLTGLPVDTATGSHFVSLVDDSSAEAVKKMLELALQGNEEQNVQFEFKTHGPRSESGPVSLVVNACASRDVKENIVGVCFIAQDITTQKSMMDKFTRIEGDYRAIVQNPNQLIPPIFGSDEF

SEQ ID NO: 35316 - protein, 612 aa, Rhinanthus minor
SGKPFYAIIHRVTASLIIDFEPVKPHEVPMTAAGALQSYKLASKAIARLQALSGGSIERLCETMVQEVFELTGYDRVMTYKFHEDDHGEVLTEITKPGLEPYVGLHYPATDIPQAARFLFMKNKVRMICDCRANHVRVIQDENLPMDLTLCGSTLRAPHSCHLQYMENMNSIASLVMSVVVNEGNEEAAPDETPQQLDKRKRLWGLVVCHNTSPRFVPFPLRYACEFLAQVFAIHVNKEIEMENQMLEKNILRTQTLLCDMLLRDAPLGMVSQSPNVMDLVKCDGSILLHKNQKYRLGITPSDFQIRDIVSWLDEYHRDSTGLSTDSLYDAGFPGALALGDVVCGMAAVRITDRDWLFWFRSHTASEIRWGGAKHELGERDDGRKMHPRSSFKAFLEVVKTRSLPWKDFEMDAIHSLQLILRNASSKEMEERKDLEGVEIQARLNELQIDGVQELEAVTSEMVRLIETASVPIFAVGVDGLVNGWNTKIADLTGLPVDKAIGLHFLSLVEESSAEAVSKMLELALEGKEEQNVHFEIKTHGPNSDSSPISLIVNACASRDFRENVVGVCFIAQDITTQKSVMDKFTRIEGDYRAIVQNPNPVIPPIFGTDEF

SEQ ID NO: 35317 - protein, 612 aa, Schwalbea americana
SGKPFYAIIHRVTGSLIIDFEPVKPHEVPMTAAGALQSYKLAAKAITRLQALPSGSLERLCDTMAQEVFELTGYDRVMVYRFHDDDHGEVFTEITKPGLEPYAGLHYPATDIPQAARFLFMKNKVRMICDCRLNHVKVVQDGNLGFDLTLCGSTLRAPHSCHVQYMENMNSIASLVMSVVVNEGEEESSGPGLDTSQLDKRKRLWGLVVCHNTSPRFVPFPLRYACEFLAQVFAIHVSKELELENQMLEKNILRTQTLLCDMLLRDAPLGIVTQSPNVMDLVKCDGALLLHKGIKYRLGLTPTDFQLRDLVSWLDEYHRDSTGLSSDSLYDGGFPGALALGDAICGMAAVRITDKEWLFWFRSHTAAEIRWGGAKHESAEKDDGRKMHPRSSFKAFLEVVKTRSLPWKDYEMDAIHSLQLILRNTSLKEADDKDLGGREIQEKLGELQIDGMHELEAVTSEMVRLIETASVPIFAVGVDGLVNGWNTKIADLTGLHVDEAIGKHFLGLVEETSADAVSKMLESALEGKEEQNVHFEIKTHGLRSESGPISLIVNACASRDVKDSVVGVCFIAHDITAQKSVMDKFTRIEGDYRAIIQNPNPLIPPIFGTDEF

SEQ ID NO: 35318 - protein, 607 aa, Scrophularia arguta
SGKPFYAIIHRVTGSLVIDFEPVKPHEVPMTTAGALQSYKLAGKAINRSQSLPSGSVERLCDTMVQEVFELTGYDRVMTYKFHDDDHGEVFTEVTKPGLEPYAGLHYPATDIPQAARFLFMKNKVRMICDCRAEHVKVVQDEKLPFDLTLCGPTLRAPHSCHLQYMENMNSIASLVMSVVINEGAEEVSEPSSPQKRKRLWGLVVCHNTTPRFVPFPLRYACEFLAQVFAIHVNKELELENQMLEENILRTQTLLCDMLLKDAPLAIVSQSPNVMDLVKCDGAALLYKNKRYRLGLTPTDFQIRDLLSWLDTYHRDSTGFSTDSLYDAGFPGSLALGDAVCGMAAVKITNKDWLFWFRSHTAAEIRWSGAKHEPGEKDDGRKMHPRSSFRAFLEVVKTGSLPWKDYEMDAMHSLQLILRNAFREADAKDYETEAIHTRLNDLRVDGIHELEAVTSEMVRLIEAASVPILAVDVDGVVNGWNTKIAALTGLTIDQAIGRDFLMLVEDSCADRVSKMLELALQGKEETNVEFEIKTHGSRSGSDPITLIVNACASRDVKENVIGACFIAQDITDQKSMMDKSTRIEGDYRAIVQNPNPLIPPIFGTDEF

SEQ ID NO: 35319 - protein, 614 aa, Sopubia cana
FYAIIHRVTGCIVIDFEPVKPHEVPMTAAGALQSYKMAAKAIARLQALPNGSLERLCQTMAQEVFELTGYDRVMVYRFHDDDHGEVFAEITKPGLEPYLGLHYPAIDIPQAARFLFMKNKVRMIWDCRANRVKVVQDEALSSDLTLCGSTLRAPHSCHLRYMENMNSIASLVMSVVINEGTDEDSPISSSPSHPDKRIRIWGLVVCHHTSPRFIPFPLRYACEFLSQVFAIHVTKELELQNQMLEKSILKTQTVLCNMLLRGSPLSIVTQSPTVMDLIKCDGSILLYKGTMHRLGMAPSELQIQDIISWLDEYHSDSTGMSTDSLLEAGFPGAAALGDAFCGMAAVRITVRDWLFWFRAHTAAEVRWGGAKHEKEDEDDGRRMHPRSSFKAFREVVKARSVLWRDFEMDAIHTLQLILRSVCEKEEEEERERRKDVVVAGEIEARLNEMHINGAKEMDAVISEMVRLIEMASVPILAVGVNRMVNGWNTKIADLTGLPVDGAIGRQFLELIEEDSADVVRRMLELALQGQEERNVQFEIKTHGPRANSGSISLVVNACTNRDVEDNIVGVVFIAQDVTTERSMMDKFTRIEGDYRAIVQNPNPLIPPIFGLDEF

SEQ ID NO: 35320 - protein, 471 aa, Striga asiatica
SGKPFYAIIHRVTGSLVIDFEPVKPHEVPMTAAGALQSYKLAAKAITRLQALPSGSLEKLCETMAQEVFELTGYDRVMVYKFHEDDHGEVFAEVTRPGLEPYLGLHYPATDIPQAARFLFMKNKVRMICDCRAAHVKVVVQDEGFSSNLTLCGSTLRAPHSCHLRYMENMNSIASLVMSVVINEGTDEESSTATSSSSSSHHHPDKQKRLWGLVVCHHTSPRFVPFPLRYACEFLSQVFSIHVGKELELLNQTLEKNILKTQTMLCDMLLRGNPLAVVTQSPTVMDLVKCDGAVFLYKGKNHRLGLSPSDLQIFDIVSWLDEFHRDSTGMTTDSLLGAGFPGAGALGDAFCGMAAVRITGRDWLFWFRSHTAAEVQWGGAKQEKGEEDDGRKMHPRSSFKAFLEVVKARSVAWREFEMDAIHSLQLILRNACDKEEEEEARRKDMVVAGEIQSRLNELHIDGAKEMEMVTS

SEQ ID NO: 35321 - protein, 491 aa, Striga gesnerioides
SGKPFYAIIHRVTGSLVIDFEPVKPHEVPMTAAGALQSYKLAAKAITRLQSLPSGSLERLCETMAQEVFELTGYDRVMVYKFHEDDHGEVFAEVTRPGLEPYLGLHYPATDIPQAARFLFMKNKVRMICDCRAAHVKVVQDECFSSDLTLCGSTLRAPHSCHLRYMENMNSIASLVMSVVINEGTDEESSASSSSSSHPDKEKRLWGLVVCHHTSPRFVPFPLRYACEFLSQVFSIHVGKELELLNQTLEKNILKTQTLLCDMLLRGNPLAVVTQSPTVMDLVKCDGAVFLYKGKNHRLGLAPSDLQILDIVSWLDEYHRDSTGMTTDSLLGAGFPGAAALGDAFCGMAAVRITGRDWLFWFRSHTAAEVQWGGAKQEKGDEDDGRKMHPRSSFKAFLEVVKARSVPWRDFEMDAIHSLQLILRNACDKEEEEEARRKDMVVAGEIQSRLNELHIDGAKEMEMVTSEMVRLIETASVPILAVGVEGLVFRV

SEQ ID NO: 35322 - protein, 607 aa, Strobilanthes attenuata
SGKPFYAIIHRVTGGLIIDFEPVKPHEVPMTAAGALQSYKLAAKAITRLQSLPSGSMERLCDTMVQEVFELTGYDRVMIYKFHDDDHGEVFSEVTKPGLEPYSGLHYPATDIPQAARFLFMKNKVRMICDCRANHVNVVQDEKLTLDLTLCGSTLRAPHSCHLQYMENMISIASLVMSVVVNEGDEEASNSSQPEKRKRLWGLVVCHHSSPRFVPFPLRYACEFLAQVFAIHVNKELELENQMLEKNILRTQTLLCDMLMRDAPLGIVSQSPNVMDLVKCDGAVLLYKGKMYRLGLSPIDFQTRDIVSWLDEYHRDSTGLSTDSLYDAGFPGALSLGDAVCGMAAVKITDKDWLFWFRSHTAAEIRWGGAKHEPSEKDDGRKMHPRSSFKAFLEVVKTRSLPWKDYEMDAIHSLQLILRNAFKEAEGDNMEANVIHTRLSDLQIDGIQELEAVTSEMVRLIETASVPILAVDVDGLVNGWNTKIADLTGLTVDKAIGRHFIGLVEESSADIVSKMLELALQGKEERNVQFEIKTHGPGSEAGPISLVVNACASRDVKENVVGVCFIAQDITAQKTMMDKFTKIEGDYRAIVQNPNPLIPPIFGTDEF

SEQ ID NO: 35323 - protein, 612 aa, Tozzia alpina
SGKPFYAIIHRVTASLIVDFEPVKPHEVPMTAAGALQSYKLASKAISRLQSLPSGSMGRLCETMAQEVFELTGYDRVMIYKFHEDDHGEVLTEITKPGLEPYVGLHYPATDIPQAARFLFMKNKVRMICDCRANHVRVIQDESLPLELTLCGSTLRAPHNCHLQYMENMNSIASLVMSVVVNEGNEEAGPGDSSQHPDKRKRLWGLVVCHNTSPRFVPFPLRYACEFLAQVFAIHVNKELELENQTLKKNILRTQTLLCDMLLRDAPLGIVSQSPNVMDLVKCDGAILLHKNQKHRLGITPSDFHIRDIVSWLDEYHRDSTGLSTDSLYDAGFPGALALGDVVCGMAAVRITDRDWLFWFRSHTASEIRWGGAKNELGEKADGRKMHPRSSFKAFLEVVKTRSLPWKDFEMDAIHSLQLILRNASSKEVEGRKDLEGVEIQARLNELQIDGVQELEAVTSEMVRLIETASVPIFAVGVDGLVNGWNTKIADLTGLPVDKAIGVHFLSLVEESSAEAVSKMLELALKGKEEQNVHFEIKTHGPNSDSSPISLIVNACTSRDVRENVVGVCFIAQDITTQKSVMDKFTRIEGDYRAIVQNPNPIIPPIFGTDEF

SEQ ID NO: 35324 - protein, 609 aa, Triphysaria pusilla
SGKPFYAIIHRVTGSMIIDFEPVKPHEVPMTAAGALQSYKLAAKAITRLQALPSGSMERLCDTMVQEVFELTGYDRVMIYKFHDDDHGEVLSEITKPGLDSYAGLHYPATDIPQAARFLFIKNKVRMICDCRANHVKVIQDDNLPFDLTLCGSTLRAPHSCHLQYMENMNSIASLVMSVVVNEGDEDGPNSSSHPDKKKRLWGLVVCHNTSPRFVPFPLRYACEFLAQVFAIHVNKEIELENQMLEKNILRTQTLLCDMLLRDAPLGIVSQSPNVMDLVKCDGAVLIHKTKKYRLGMTPSDFQIRDIVSWLDEYHRDSTGLSTDSLYDAGFPGALALGDAVCGMAAVRITDTDWLFWFRSHTASEIRWGGAKHEPDDKDDGRKMHPRSSFKAFLDVVKTRSLPWKDFEMDAIHSLQLILRNSSNKEAEKRDVDGKEIHARLNDLQLDGKRELEAVTSEMVRLIETASVPIFAVDVDGLVNGWNTKIADLTGLPVDKAIGKHFLALVEDSFAEAVNKMLGSALQGNEEQNVQFEIKTHGPKSDSNPISLIVNACASRDVKENVVGVCFIAQDITTQISMMDKFTRIEGDYRAIVQNPNQLIPPIFGSDEF

SEQ ID NO: 35325 - protein, 378 aa, Epifagus virginiana
VPMTAAGALQSYKLAAKAITRLQALRGGSMERLCDTMVQEVFELTGYDRVMIYKFHDDDHGEVSAEITKPGLEPYVGLHYPATDIPQAARFLFMKNKVRMICDCRANHVKVVQDENLPFDLTLCGSTLRAPHSCHLQYMENMNSIASLVMSVVVNEGNEDEPNSSSGPEKRKMLWGFLVCHNTSPRFVPFPLRYACEFLVQVFAIHVNKELELKNQMLEKNILRTQTLLCDLLLRDAPLGIVSQSPNVMDLVKCVGAILLYKNTKYRLGLTPSDFQIGDIVSWLDEYHRDSTGLSTDSLYDAGFPGALALGDALCGMAAVRITDKDWLFWFRSHTAAEIQWGGMKHEPDEKDDGSKMHPRSSFKAFLEVVKTRSLPWK

SEQ ID NO: 35326 - protein, 387 aa, Agalinis fasciculata
  misc_feature (244)..(244): Xaa can be any naturally occurring amino acid
  unsure (1)..(387): unsure at all Xaa locations
DFEPVKPYEVPMTAAGALQSYKLAAKAITRLQALPSGSLERLCDTMVQEVFELTGYDRVMIYKFHDDDHGEVLSEITKPGLEPYVGLHYPATDIPQAARFLFIKNKVRMICDCRANHVKVIQDDNLPFDLTLCGSTLRAPHSCHLQYMENMNSIASLVMSVVVNEGNEDGPDSSSHPDKKKRLWGLVVCHNTSPRFVPFPLRYACEFRAQVFAIHVNREIELENQMLEKNILRTQTLLCDMLMXDAPLGIVSQSPNVMDLVKCDGAVLIYKTKKYRLGMTPSDFQIRDIVSWLDEYHRDSTGLSTDSLYDAGFPGALALGDAVCGMAAVRITNTDWLFWFRSHTAAEIRWGGAKHEPGEKDDGRKMHPRLSFKAFLEVVKTRSLPWK

SEQ ID NO: 35327 - protein, 608 aa, Ajuga reptans
SGKPFYAIIHRVTGSLIIDFEPVKPHEVPMTAAGALQSYKLAAKAITRLQSLPSGSMERLCDTMVQEVFELTGYDRVMIYKFHDDDHGEVFAEVTKPDLEPYVGLHYPATDIPQAARFLFMKNKVRMICDCKANHVKVVQDENLPLDLTLCGSTLRAPHSCHLQYMENMNSIASLVMSVVVNEGNEEGGSESTHPEKRKRLWGLVVCHLTSPRFVPFPLRYACEFLAQVFAIHVNKELELENQMMEKNILRTQTLLCDMLLRDAPLGIVSQSPNVMDLVKCDGAALLYKNKKYKLGLTPTDFQIRDVVSWLDEYHRDSTGLSTDSLYDAGFPGALALGHAVCGMAAVKINDKDWLFWFRSHTASEIRWGGAKHEPGEKDDGRKMHPRSSFRAFLEAVKTRSLPWKDYEMDAIHSLQLILRNAFKEADDKDTDTKMIHTKLNDLQIDGIQELEAVTSEMVRLIETASVPILAVDADGLVNGWNTKIADLTSLPVDKAIGRHFLDLVEDTSADIVSHMLQLALQGKEEQNVQFEIKTHGENSESGPVTLIVNACASRDVKENVVGVCFIAQDITAQKSMMDKFTRIEGDYRAIIQNPNPLIPPIFGTDEF

SEQ ID NO: 35328 - protein, 619 aa, Alectra sessiliflora
SGKPFYAIIHRVTGSLVIDFEPVKPHEVPMTAAGALQSYKLAAKAIARLQATPSGSLERLCETMAQEVFELTGYDRVMVYKFHDDDHGEVFTEITKPGLEPYAGLHYPATDIPQAARFLFMKNKVRMICDCRSAHVKVVQDEGLFSDLTLCGSTLRAPHSCHLRYMENMNSIASLVMAVVVNEGNDEESSASSSSTSSHPEKKKRLWGLVVCHHTSPRFVPFPLRYACEFLSQVFSIHVSKELELLNQTQEKNILKTQTMLCDMLLRGNPLAIVTQSPTVMDLVKCDGAVLLYKGKTHRLGLAPSDLQIRDIMSWLDEYHRDSTGTSTDSLLDAGFPGAAALGDAFCGMAAIRITGRDWLFWFRSHTAAEVRWGGAKHEKGDEDDGRRMHPRSSFNAFLEVVKARSVPWRDFEMDAIHSLQLILRNACEKEMEEEERRKDMVVAGEIQARLTELHIDGAREMEAVTSEMVRLIETASVPILAVGVDGLVNGWNTKIADLTGLLVDEAIGQPFLALVEEASVDAVSRMLERALQGHEERNVQFEIKTHGPRAESGPISLVVNACASRDVRENVVGVCFIAQDVTTERSMMDKFTRIEGDYRAIVQNPNPLIPPIFGSDEF

SEQ ID NO: 35329 - protein, 524 aa, Aureolaria pedicularia
SGKPFYAIIHRVTGSMIIDFEPVKPHEVPMTAAGALQSYKLAAKAITRLQALPSGSMERLCDTMVQEVFELTGYDRVMIYKFHDDDHGEVLSEITKPGLEPYVGLHYPATDIPQAARFLFIKNKVRMICDCRANHVKVIQDDKLPIDLTLCGSTLRAPHSCHLQYMENMNSIASLVMSVVVNEGNEDGPDSSSHPDKQKRLWGLVVCHNTSPRFVPFPLRYACEFLAQVFAIHVNKEIELENQMLEKNILRTQTLLCDMLLRDAPLGIVSQSPNVMDLVKCDGAVLIYKTKKYRLGMTPSDFQIRDIVSWLDEYHRDSTGLSTDSLYDAGFPGALALGDAVCGMAAVRITDTDWLFWFRSHTAAEIRWGGAKHEPGEKDDGRKMHPRLSFKAFLEVVKTRSLPWKDFEMDAIHSLQLILRNASNKEAEERDVDGKEIHARLNDLQLDGIQELEAVTSEMVRLIETASVPIFAVDVDGLVNGWNTKIADLTGLPVDKAIGRHFLALVEDSSAEAVNKMLELALQG

SEQ ID NO: 35330 - protein, 389 aa, Bartsia alpina
DFEPAKPYEVPMTAAGALQSYKLASKAIARLQSLPSGSMERLCEAMAQEVFELTGYDRVMIYKFHEDDHGEVLTEITKPGLEPYVGLHYPATDIPQAARFLFMKNKVRIICDCRANHVRVIQDENLPLDLTLCGSTLRAPHSCHLQYMENMNSIASLVMSVVVNEGNEEAGPDDSSQHPDKRKRLWGLVVCHNTSPRFVPFPLRYACEFLAQVFAIHVNKELELENQMLEKNILRTQTLLCDMLLRDAPLGIVSQSPNVMDLVKCDGAILLHKNRKHRLGITPSDFQIRDIVSWLDEYHRDSTGLSTDSLYDAGFPRALALDDIVCGMAAVRITDRDWLFWFRSHTASEIRWGGAKHEPDERDDPRKMHPRSSFKAFLEVVKTRSLPWK

SEQ ID NO: 35331 - protein, 615 aa, Boschniakia hookeri
SGKPFYAIIHRVTGSLIIDFEPVKPHEVPMTAAGALQSYKLAAKAITRLQALPGGSMERLCDTMVQEVFELTGYDRVMIYKFHDDDHGEVSTEITKPGLEPYVGLHYPATDIPQAARFLFMKNKVRMICDCRANHVKVVQDENLSFDLTLCGSTLRAPHSCHLQYMENMNSIASLVMSVVVNEGNEDGPDSSSVPDKRKTLWGLVVCHNTSPRFVPFPLRYACEFLAQVFAIYVNKEFELENQMLEKNILRTQTLLCDLLLRDAPLGIVSQSPNVMDLVKCDGAVLLYKNTKYRLGLTPSDFQIRDIVSWLDEYHRDSTGLSTDSLYDAGFPGALSLCDAVCGMVAVRITERDWLFWFRSHTAAEIQWGGAKHEPGETDDGRKMHPRSSFKAFLEVVKTRSLPWKDFEMDAIHSLQLILRNAFKESEGRDSESREIHARLHDLQIDGVREIEAVTSEMVRLIETASVPIFAVDVDGLVNGWNTKIADLTGLCVDKAIGWHFLALVEDSSADTVSKMLELALQGKEEQNVQFEIKTHGQTSESGPITLIVNACASRDVKGNVVGVCFIAQDITTQKIMMDKFTRIEGDYRTIVQNPNPLIPPIFGTDEFGWCSEWN

SEQ ID NO: 35332 - protein, 592 aa, Boschniakia rossica
SGKPFYAIIHRVTGGLIIDFEPVKPHDVPMTAAGALQSYKLAAKAITRLQALPSGSMERLCDTMVQEVFELTGYDRVMIYKFHDDDHGEVFTEITKPGLEPYVGLHYPATDIPQAARFLFMKNKVRMICDCRANHVKVVQDENLPFDLTLCGSTLRAPHSCHLQYMENMNSIASLVMSVVVNEGNEEDGPDSSSGPDKRKRLWGLVVCHNTSPRFVPFPLRYACEFLAQVFAIHVNKELELKNQMLEKNILRTQTLLCDLLLRDAPLGIVSQSPNVMDLVKCDGAVLLYKNTKYRLGLTPSDFQVRDIVSWLDEYHRDSTGLSTDSLYDADFPGARALGDAVCGMAAVRITDSDWLFWFRSHTAAEIRWGGVKHEPGEKDDGRKMHPRSSFKAFLEVVKARSLPWKDYEMDAIHSLQLILRNAFKESEGRDLESREIHARLNELQIDGAREIEAVASEMVRLIETASVPIFAVDVDGLVNGWNTKIADLTGLCVDKAIGSHFLALVEKEEQNVQFEIKTHGQTSESGPISLIVNACASRDVKENVVGVCFIAQDITTQKSMMDKFTRIEGDYRAIVQNPNPLIPPIFGTDEF

SEQ ID NO: 35333 - protein, 608 aa, Boschniakia strobilacea
SGKPFYAIIHRVTGSLIIDFEPVKPHEVPMTAAGALQSYKLAAKAITRLQALPGGSMERLCDTMVQEVFELTGYDRVMIYKFHDDDHGEVSTEITKPGLEPYVGLHYPATDIPQAARFLFMKNKVRMICDCRANHVKVVQDENLSFDLTLCGSTLRAPHSCHLQYMENMNSIASLVMSVVVNEGNEDGPDSSSVPDKRKTLWGLVVCHNTSPRFVPFPLRYACEFLAQVFAIYVNKEFELENQMLEKNILRTQTLLCDLLLRDAPLGIVSQSPNVMDPVKCDGAVLLYKNTKYRLGLTPSDFQIRDIVSWLDEYHRDSTGLSTDSLYDAGFPGALSLCDAVCGMVAVRITERDWLFWFRSHTAAEIQWGGAKHEPGETDDGRKMHPRSSFKAFLEVVKTRSLPWKDFEMDAIHSLQLILRNAFKESEGRDSESREIHARLHDLQIDGVREIEAVTSEMVRLIETASVPIFAVDVDGLVNGWNTKIADLTGLCVDKAIGWHFLALVEDSSADTVSKMLELALQGKEEQNVQFEIKTHGQTSESGPITLIVNACASRDVKENVVGVCFIAQDITTQKIMMDKFTRIEGDYRTIVQNPNPLIPPIFGTDEF

SEQ ID NO: 35334 - protein, 398 aa, Brandisia hancei
SGKPFYAIIHRVTGSLIIDFEPVKPHEVPMTAAGALQSYKLAAKAITRLQSLPSGSMERLCDTMVQEVFELTGYDRVMIYKFHDDDHGEVFTEITRPGLESYVGLHYPATDIPQAARFLFMKNKVRMICDCRANHVQVVQDDNLPFDLTLCGSTLRAPHSCHLQYMENMNSIASLVMSVVVNEGSEEAGGPDSSLHPDKRKRLWGLVVCHNTSPRFVPFPLRYACEFLTQVFAIHVNKELELENQMLEKNILRTQTLLCDMLLRDAPLGIVSQSPNVMDLVKCDGAVLIYKNNKYRLGLTPSDFQIRDIVSWLDEYHRDSTGLSTDSLYDAGFPGALTLGDAICGMAAVRITDKDWLFWFRSHTAAEIRWGGAKHEQGEKDDGRKMHPGSSFKAFLKL

SEQ ID NO: 35335 - protein, 466 aa, Buchnera floridana
SGKPFYAVIHRVTGSLVIDFEPVEPHEVPMTAAGALQSYKLAAKAISRLQALPSGSLERLCETMAQEVFELTGYDRVMVYRFHDDDHGEVFAEITRPGLEPYLGLHYPATDIPQAARFLFMKNKVRMICDCRAAHVKVVQGEGLSSNLTLCGSTLRAPHSCHLRYMENMNSIASLVMSVVINEGTDEESSATSSSSSHPDKQKRLWGLVVCHHTSPRFVPFPLRYACEFLSQVFSIHVGKELELLNQTVEKNILKTQTMLCDMLLRGNPLAIVTRSPTVVDLVKCDGAVFLYKGKYHRLGLAPSDLQIQEIVSWLDEYHRDSTGMSTDSLLGAGFPGAAKLGDAFCGMAAVRITGRDWLFWFRSHTAAEVQWGGAKQEKGDEDDGRKMHPRSSFKAFLEVVKARSVPWRDFEMDAIHSLQLILRKACDKEEEEEARRKDMVVAGEIQSRLNEMHIDGAKEMEMVTS

SEQ ID NO: 35336 - protein, 609 aa, Castilleja miniata
SGKPFYAIIHRVTGSMIIDFEPVKPHEVPMTAAGALQSYKLAAKAITRLQALPNGSMERLCDTMVQEVFELTGYDRVMIYKFHDDDHGEVLSEITKPGLDPYVGLHYPATDIPQAARFLFIKNKVRMICDCRANHVKVIQDDNLPFDLTLCGSNLRAPHSCHLQYMENMNSIASLVMSVVVNEGNEDGPNSSSHPDKKKQLWGLVVCHNTSPRFIPFPLRYACEFLAQVFAIHVNKEIELENQMLEKNILRTQTLLCDMLLRDAPLGIVSQSPNVMDLVKCDGAILIHKTKKYRLGMTPSDFQIRDIVSWLDEYHRDSTGLSTDSLYDAGFPGALALGDAVCGMAAVRITDTDWLFWFRSHTASTIRWGGAKHEPDDKDDGRKMHPRSSFKAFLDVVKTRSLSWKDFEMDAIHSLQLILRNSSSKEAEKGDVEGKEIHARLNDLQLDGKKELEAVTSEMVRLIETASVPIFAVDVDGHVNGWNTKIADLTGLPVDKAIGRHFLALVEDSSAEAVNKMLELALQGNEEQNVQFEIKTHGPRSESHPISLIVNACASRDVKENVVGVCFIAQDITTQKSMMDKFTRIEGDYRAIVQNPNQLIPPIFGTDEF

SEQ ID NO: 35337 - protein, 585 aa, Castilleja sulphurea
PYEVPMTAAGALQSYKLAAKAITRLQALPSGSMEQLCDTMVQEVFELTGYDRVMIYKFHDDDHGEVLSEVTKPGLDPYVGLHYPATDIPQAARFLFLKNKVRMICDCRANHVKVIQDDNLPFDLTLCGSILRAPHSCHLQYMENMNSIASLVMSVVVNEGNEDGPDSSSHPDKKKRLWGLVVCHNTSPRFVPFPLRYACEFLAQVFAIHVNKEIELENQMLEKNIIRTQTLLCDMLLRDAPLGIVSQSPNVMDFVKGDGAILLYRTKNYRLRKTPSDYQIRDIVSWLDEYHHESTGLSTDSLYDAGFPGALALGDAVCGMAAVRITNTDWLFWFRSHTAAEIRWGGGKHEPGEKDDGRKMHPRLSFKAFLEVVKTRSLPWKDFEMDAIHSLQLILRNASNKEVEEMDVDGKEIHARLNDLQLDGIKELEAVTSEMVRLIETASVPIFAVDMDGLVNGWNTKIADLTGLPVDKAIGRHFLGLVEYSSAEVVNKMLELALQGNEEQNVQFEIKTYGPRSESAPISLIMNACASWDVKENVVGVCFIAQDITIQKSMMDKFTRIEGDYRAIVQNPNQLIPPIFGTDGF

SEQ ID NO: 35338 - protein, 457 aa, Castilleja sulphurea
SGKPFYAIIHRVTGSMIIDFEPVKPHEVPMTAAGALQSYKLAAKAITRLQALPNGSMERLCDTMVQEVFELTGYDRVMIYKFHDDDHGEVLSEITKPGLDPYVGLHYPATDIPQAARFLFIKNKVRMICDCRANHVKVIQDDNLPFDLTLCGSNLRAPHSCHLQYMENMNSIASLVMSVVVNEGNEDGPNSSSHPDKKKQLWGLVVCHNTSPRFVPFPLRYACEFLAQVFAIHVNKEIELENQMLEKNILRTQTLLCDMLLRDAPLGIVSQSPNVMDLVKCDGAVLIHKTKKYRLGMTPSDFQIRDVVSWLDEYHRDSTGLSTDSLYDAGFPGALALGDAVCGMAAVRITDTDWLFWFRSHTASEIRWGGAKHEPDDKDDGRKMHPRSSFKAFLDVVRTRSLPWKDFEMDAIHSLQLILRNSSNKEAEKRDVEGKEIHARLNDLQLDGKKELEAVTS

SEQ ID NO: 35339 - protein, 615 aa, Chelone obliqua
SGKPFYAIIHRVTGSLIIDFEPVKPHEVPMTAAGALQSYKLAAKAITRLQSLPSGSMERLCDTMVQEAFELTGYDRVMIYKFHDDDHGEVFSEVTKPGLEPYVGLHYPATDIPQAARFLFMKNKVRMICDCRAKHVKVVQDEKLSFDLTLCGSTLRAPHSCHLQYMENMNSIASLVMSVVVNEGDEDGSESVHPQKRKRLWGLVVCHNTSPRFIPFPLRYACEFLAQVFAIHVNKELELENQMLEKNILRTQTLLCDMLLRDAPLGIVSQSPNVMDLVKCDGAALMYKNKKYKMGLTPTDFQIRDIVSWLDEYHRDSTGLSTDSLYDAGFPGALALGDAICGMAAVKISERDWLFWFRSHTAAEIRWGGAKHEQGEKDDGRKMHPRSSFKAFLEVVKTRSLPWKDYEMDAIHSLQLILRNAFKDGENADSDTKAIHTRLTDLRIDGMQELEAVTSEMVRLIETASVPILAVDVDGHVNGWNSKIADLTGLPVDEAIGKQFLELVEDSSTDTVSKMLKLALEGKEEQNVQFEVKTHGERSDSGPVTLVVNACASKDVEENVVGVCFIAQDITAHKNMMDKFTRIEGDYKAIVQNPNPLIPPIFGTDEFGWCSEWNN

SEQ ID NO: 35340 - protein, 605 aa, Conopholis alpina
SGKPFYAIIHRVTGSLIIDFEPVKPHEVPMTAAGALQSYKLAAKAITRLQALRGGSMERLCDTMVQEVFELTGYDRVMIYKFHDDDHGEVSTEITKPGLEPYVGLHYPATDIPQAARFLFMKNKVRMICDCRASHVKVVQDENLPFDLTLCGSTLRAPHRCHLLYMENMNSIASLVMSVVINEGNEDGASSSSGPDKRKTLWGLLVCHNTSPRFVPFPLRYACEFLVQVFAIHVNKELELENQMLEKNILRTQTLLCDLLLRDAPLGIVSQSPNVMDLVKCIGAVLLYKNTKYRLGLTPSDFQIRDIVSWLDEYHWDSTGLSTDSLYDAGFPGALALGDALCGMAAVRITDRDWLFWFRSHTAAEIQWGGMKHEPDEKDDGSKMHPRSSFKAFLEVVKTRSLPWKDYEMDAIHSLQLILRNAFKESEGRDLEIHARLNELQIGGVREIEAVATEMVRLIETASVPIFAVDVDGLVNGWNTKIADLTGLCVNKAMGSHFLALVEDSSADTVSKMLELALQGKEEQNVQFEIKTHGQNSESGPITLMVNACASRDVKENVVGVCFIAQDITTQKSMMDKFTRIEGDYRAIVQNPNPLIPPIFGTDEF

SEQ ID NO: 35341 - protein, 604 aa, Conopholis americana
SGKPFYAIIHRVTGSLIIDFEPVKPHEVPMTAAGALQSYKLAAKAITRLQALRGGSMERLCDTMVQEVFELTGYDRVMIYKFHDDDHGEVSTEITKPGLEPYVGLHYPATDIPQAARFLFMKNKVRMICDCRASHVKVVQDENLLFDLTLCGSTLRAPHRCHLLYMENMNSIASLVMSVVINEGNEDGASSSSGPDKRKTLWGLLVCHNTSPRFVPFPLRYACEFLVQVFAIHVNKELELENQMLEKNILRTQTLLCDLLLRDAPLGIVSQSPNVMDLVKCIGAVLLYKNTKYRLGLTPSDFQIRDIVSWLDEYHWDSTGLSTDSLYDAGFPGALALGDALCGMAAVRITDRDWLFWFRSHTAAETQGGMKHEPDEKDDGSKMHPRSSFKAFLEVVKTRSLPWKDYEMDAIHSLQLILRNAFKESEGRDLEIHARLNELQIGGVREIEAVATEMVRLIETASVPIFAVDVDGLVNGWNTKIADLTGLCVNKAMGSHFLALVEDSSADTVSKMLELALQGKEEQNVQFEIKTHGQNSESGPITLMVNACASRDVKENVVGVCFIAQDITTQKSMMDKFTRIEGDYRAIVQNPNPLIPPIFGTDEF

SEQ ID NO: 35342 - protein, 607 aa, Glechoma hederacea
SGKPFYAIIHRVTGSLIIDFEPVKPHEVPMTAAGALQSYKLAAKAITRLQALPSGSIERLCDTMSQEVFELTGYDRVMIYKFHEDDHGEVFTEIRKPGLEPYVGLHYPATDIPQAARFLFMKNKVRMICDCRANHVKVVQDENLPLELTLCGSTLRAPHSCHLQYMENMNSIASLVMSIVVNEGEEEGSDSTHPDKRKRLWGLVVCHHTSPRFVPFPLRYACEFLTQVFAIHVNKELELENQMLEKNILRTQTLLCDMLLRDAPLGIVSQSPNVMDLVKCDGAALLYKNKKYRLGMTPGDFQIRDVVSWLDEYHRDSTGLSTDSLYDAGFPGALALGDAVCGMAAVKITDKDWLFWFRSHTAAEVRWGGAKHEPDEKDDGRKMHPRSSFKAFLEVVKTRSLPWKDYEMDAIHSLQLILRNSYKEDEDTDTYAKAIHTRLSDLQIEGIQELEAVTSEMVRLIETASVPILAVDVDGMVNGWYTKIADLTGLPVDKAIGCHFLSLVEESSADAVSSMLELALKGEEERNVQFEIKTHGERSESGPISLVVNACASRDIKESVVGVCFIAQDITAQKSMMDKFTRIEGDYKAIVQNPNPLIPPIFGTDEF

SEQ ID NO: 35343 - protein, 617 aa, Hyobanche atropurpurea
SGKPFYAIAHRVTGSLVIDFEPVKPQEVPMTAAGALQSYKLAARAIARLQALPSGSLERLCETMAQEVFELTGYDRVMVYRFHDDDHGEVFAEITRPGLEPYVGLHYPATDIPQAARFLFLKSKVRMICDCRAAHVKVVQDEGLSSDLTLCGSTLRAPHSCHLCYMENMNSIASLVMSVIVNEGTDEESSTSSSSHPDKRKRLWGLVVCHHTSPRFVPFPLRYACEFLSQVFAIHVSKELELLNQTLEKNILKTQTVLCDMLLRGNPLAVVTQSPTVMDLIKCDGAVLLYKGKKHRLGVTPSDPHIWDIVLWLDEYHRDSTGTSTDSLLDAGFPGAVALGDAFCGMAAVRITGHDWLFWFRSHTEAEVRWGGAKHEMGGEDDDRKMHPRSSFKAFLEVVKARSVPWRDFEMDAIHSLQLILRNACEKEEEEEERRRKDMVVAGEIQARLNKLHIDGARDMEAVTSEMVRLIETALVPILAIGVDGLVNGWNAKIADLTGLPVDGAIGRHFLALVGEASADTFSRMLELALQGQEERNVQFEIKTHGPRTDFGPISLVVNACASRDVKDNVVGVCFIAQDVTTVRSMMDKFTRIEGNYRALVQNPNPLIPPIFGSDEF

SEQ ID NO: 35344 - protein, 596 aa, Hyobanche glabrata
PYEVPMTAAGALQSYKLAAKGIARLQAMPSGSLERLCETMAQEVFELTGYDRVMVYRFHDDNHGEVFTEITRPGLEPYAGLHYPATDIPQAARFLFMKNKVRMICDCRAAHVKVVQEESLSSDLTLCGSTLRAPHSCHLRYMENMNSIASLVMSVVVNEGTDEESSASSSSSSSSSHPYRRKQLWGLVVCHHTSPRFVPFPLRYACEFLSQVFAIHISKELELLNQTLEKNILKTQTVLCDMLLRGNPLSIVTRSPTVMDLVKCDGAVLLYKGKNHRLGLAPSDLQIRDIVSWLDEYHRDSTGTSTGSLLDAGFPGAGLLGNAFCGMAAVRITGRDWLFWFRSHTAAEVRWGGAKHEKGDEDDGRRMHPRSSFKAFLEVVKARSVQWRDFEMDAIHSLQLILRNACEKEEEEDRRKDMVVAREIQARLNELHIDGAKEMETVTSEMVRLIETASVPILAVGVDGLVNGWNTKIADLTGLPVDGAIGRHFLALVEEASVDVVRRMLELALQGQEEQNVQFEIKTHGPRTESNPISLIVNPCASRDVKDNVVGVCFIAQDVTTERSMIDKFTRIEGDYQAIVQNPNPLIPPFFGSDEF

SEQ ID NO: 35345 - protein, 618 aa, Hyobanche rubra
SGKPFYAIAHRVTGSLVIDFEPVKPQEVPMTAAGALQSYKLAAKAIARLQALPSGSLERLCETMAQEVFELTGYDRVMVYRFHDDDHGEVFAEITRPGLEPYVGLHYPATDIPQAARFLFLKNKVRMICDCRAAHVKVVQDEGLSSDLTLCGSILRAPHSCHLCYMENMNSIASLVMSVIVNEGTDEESSTSSSSHPDKRKRLWGLVVCHHTSPRFVPFPLRYACEFLSQVFAIHVSKELELLNQTLEKNILKTQTVLCDMLLRGNPLAVVTQSPTVMDLIKCDGAVLLYKGKKHRLGVTPSDPHIWDIVLWLDEYHRDSTGTSTDSLLDAGFPGAVALGDAFCGMAAVRITGHDWLFWFRSHTEAEVQWGGAKHEMGGEDDDRKMHPRSSFKAFLEVVKARSVPWRDFEMDAIHSLQLILRNAYEKEEEEEEERRRKDMVVAGEIQARLNELHIDGARDMEAVTSEMVRLIETALVPILAIGVDGLVNGWNAKIADLTGLPVDGAIGKHFLALVEEASADTFSRMLELALQGQEERNVQFEIKTHGPRTDFGPISLVVNACASRDVKDNVVGVCFIAQDVTTVRSMMDKFTRIEGNYRAIVQNPNPLIPPIFGSDEF

SEQ ID NO: 35346 - protein, 594 aa, Hyobanche sanguinea
PYEVPMTAAGALQSYKLAAKGIARLQAMPSGSLERLCETMAQEVFELTGYDRVMVYRFHDDNHGEVFTEITRPGLEPYAGLHYPATDIPQAARFLFMKNKVRMICDCRAAHVKVVQEESLSSDLTLCGSTLRAPHSCHLRYMENMNSIASLVMSVVVNEGTDEESSASSSSSSSHPYRRKQLWGLVVCHHTSPRFVPFPLRYACEFLSQVFAIHISKELELLNQTLEKNILKTQTVLCDMLLRGNPLSIVTRSPTVMDLVKCDGAVLLYKGKNHRLGLAPSDLQIRDIVSWLDEYHRDSTGTSTDSLLDAGFPGAGLLGNAFCGMAAVRITGRDWLFWFRSHTAAEVRWGGAKHEKGDEDDGRRMHPRSSFKAFLEVVKARSMQWRDFEMDAIHSLQLILRNACEKEEEEDRRKDMVVAREIQARLNELHIDGAKEMETVTSEMVRLIETASVPILAVGVDGLVNGWNTKIADLTGLPVDGAIGRHFLALVEEASVDVVRRMLELALQGQEEQNVQFEIKTHGPRTESNPISLIVNPCASRDVKDNVVGVCFIAQDVTTERSMIDKFTRIEGDYQAIVQNPNPLIPPFFGSDEF

SEQ ID NO: 35347 - protein, 608 aa, Lamium purpureum
SGKPFYAIIHRVTGSLIIDFEPVKPHEVPMTAAGALQSYKLAAKAINRLQSLPSGSIERLCDTMVQEVFELTGYDRVMVYKFHEDDHGEVFTEITKPGLEPYVGLHYPATDIPQAARFLFMKNKVRMICDCRATHVKVIQDGNLPIDLTLCGSTLRAPHSCHLQYMENMNSIASLVMSVVVNEGDEEGSGSDSPPEKRKRLWGLVVCHHTTPRFVPFPLRYACEFLAQVFAIHVNKEFELESQMLEKNILRTQTLLCDMLLRDAPLGIVSQSPNVMDLVKCDGAALLYKGKKYRLGMTPTDFQIRDVVSWLDEYHRDSTGLSTDSLYDAGFPGALALGDAICGMAAVKITDKDWLFWFRSHTASEVRWGGAKHEPGEKDDGRKMHPRSSFKAFLEVVKTRSIPWKDYEMDAIHSLQLILRNAFKESGGTDVEARAIHMKLSDLQIDGIQELEAVTSEMVRLIETASVPILAVDVDGLVNGWNTKIADLTGLSVDKAIGRHFLDLVEDSSAHTVNQMLKLALEGNEEHNVQFELKNHGEMTEAGPISLVVNACASRDVKESVVGVCFIAQDITAQKSMMDKFTRIEGDYRAIVQNPNPLIPPIFGTDEF

SEQ ID NO: 35348 - protein, 388 aa, Lathraea clandestina
PVKPYELPMTAAGALQSYKLASKAISRLQSLSCESIERLCETMVQEVFELTGYDRVMTYKFHGDDHGEVFTEITKPGLEPYVGLHYPATDIPQAARFLFMKNKVRMICDCRANHVRVIQDENLPMDLTLCGSTLRAPHICHLQYMENMNSIASLVMSIVVNEGNEESAPDETSQQLDKRKRLWGLVVCHNTSPRFVPFPLRYACEFLAQVFAIHVNKELELENQMLEKNILRTQTLLCDMLLRDAPLGIVSQSPNVMDLVKCDGSILLHKNQKYRLGITPGDFQIRDIVSWLDEYHHDSTGLSTGSLYDAGFPGALALGDVVCGMAAVRITDRDWLFWFRSHTASEIRWGGSKHELGERDDGRKMHPRSSFKAFLEVVKTRSLPWKDS

SEQ ID NO: 35349 - protein, 612 aa, Lathraea clandestina
SGKPFYAIIHRVTASLIIDFEPVKPHGVPTTAAGALQSYKLASKSIARLQSLPSGSIEWLCETMVQEVFQLTGYDRVMTYKFHEDDHGEVLTEITKPGLEPYVGLHYPATDIPQAARFLFMKNKVRMICDCRANHVRVIQDENLPIDLTLCGSTLRAPHSCHLQYMENMNSIASLVMSVVVNEGNEDAAPGETSQQLDKRKRLWGLVVCHNTTPRFVPFPLRYACEFLAQVFAIHLNKELELENQMLQKNILRTQTLLCDMLLCDAPLGIVSQSPNVMDLVKCDGSILLHKNQKYRLGITPTDFQIRDIVSWLDEYHRDSTGLSTDSLYDAGFPGALDLGDVVCGMAAVRITDRDWLFWFRSHTASEVRWSGAKHELGERDDGRKMHPRSSFKAFLEVVKTRSLPWKDFEMDAIHSLQLILRKASSKEMEERKDLEGVEIQARLNELQIDGVQELEAVTSEIVRLIETASVPIFAVGVDGLVNGWNTKIADFTGLPVDKAIGVHFLSLVEESSAEAVSKMLELALEGKEEQNVHFEIKTHSPNSDSSPISLIVNACASRDVRENVVGVCFIAQDITTQKSVMDKFTRIEGDYRAIVQNPNPVIPPIFGTDEF

SEQ ID NO: 35350 - protein, 382 aa, Lathraea clandestina
PYEVPTMAAGALQSYKIAAKAITRLQALPSGSGSMERLCDTMAHEVFELTGYDRVMIYKFHEEDDHGEVLTEITKPGLDPFLGLHYPATDVPLAARVLFMKHKVRMICDCRAKHVRVVQGPVDLTLCGSTLRAPHSCHVHYMENMGSMASLVMSVVLNDERVRTGGESSQQPDKRKRMWGLVVCHHVSPRFIAFPVRYACKFLAQVFATLVNKEIDLENQMVQKNVLRTHTILCDMLLRDAPLGIISQSPNVMDLVRCVGAILLYKNQNHRLGLTPNDFQICDLVSWLNEFHRDSECISTDSLYNAGFPGALTLGDAVCGMVAIRISDRDWLFWFQSHTAAEIRWGGAKPEPGDMDDGRNMNPRSSFKAFLEVVKTRCLPLK

SEQ ID NO: 35351 - protein, 609 aa, Lindenbergia philippensis
SGKPFYAIIHRVTGSLVIDFEPVKPHEVPMTAAGALQSYKLAAKAITRLQSLPSGSMERLCDTMVQEVFELTGYDRVMIYKFHDDDRGEVLTEITKPGLEPYVGLHYPATDIPQAARFLFMKNKVRMICDCRAINVKVVQDGNLPFDLTLCGSTLRAPHSCHLQYMENMNSIASLVMSVVVNEGDEEASTPDSSLHPDKRKRLWGLVVCHNTTPRFVPFPLRYACEFLAQVFAIHINKEVELENQMLEKNILKTQTLLCDMLLRDAPLGIVNQSPNIMDLVKCDGAMMLYKNQKYRFGLAPNDFQIRDLVSWLDAYHGDSTGLSTDSLYDAGFPGALALGDAVCGMAAVRITDKDWLFWFRSHTAAEIRWGGAKHERGEKDDGRKMHPRSSFKAFLEVVKTRSLPWKDYEMDAIHSLQLILRNASREADKKDLEGMEIHARLNDLQIDGIQELEVTSEMVRLIETASVPIFAVDGDGLVNGWNTKIADLAGLPVEKAIGMHFLDLVEDSSADTVGKMLKLAIQGVEERNVQFEIKTHGPRSDSTPISLVVNACASKDVKENVVGVCFIAQDITTEKSVMDKFTRIEGDYRAIIQNPNPLIPPIFGIDEF

SEQ ID NO: 35352 - protein, 605 aa, Melampyrum pratense
SGKPFYAIIHRLTASLIIDFEPVKPHEVPMTAAGALQSYKLASKSIARLQSLPGGSMERLCETMAQEVFELTGYDRVMVYKFHEDDHGEVLTEITKPGLEPYVGLHYPATDIPQASRFLFMKNKVRTICDCRANHVRVIQDENLPVDLTLCGSTLRAPHSCHLQYMENMNSIASLVMSVVVNEGNEDAGPDDSSLDKRQRLWGLVVCHNTSPRFVPFPLRYACEFLAQVFAINVNKELELENQMFEKNILRTQTLLCDMLLRDAPLGIVSHSPNVMDLVKCDGAILLHKNQKHRLGMTPNDSQFRDIVSWLEEYHRDSTGLSTDSLYDAGFPGALDLGDVVCGMAAVRISDEDWLFWFRSHTASEIRWGGARHESCERDDGQKMHPRSSFKAFLEVVKSRSLPWKDFEMDAIHSLQIILRNASSKETEERKEVGVQIQARLNELQIDGVQELEAVTSEMVRLIETASVPIFAVDVDGLVNGWNTKIADLTGLPADKAIGMHFLSLVEESSIEAVSKMLELALDGKEEQNVHFEIKTHGPSPISLIVNACASRDVKENVVGVCFIAHDITTQKSVMDMFTRIEGDYRAIVQNPNPIIPPIFGTDVF

SEQ ID NO: 35353 - protein, 382 aa, Melampyrum sylvaticum
PYEVPMTAAGALQSYKLASKAIARLQSLSSGSMERLCETMVQEVFELTGYDRVMTYKFHEDDHGEVFTEITKPGLEPYLGLHYPATDIPQAARFLFMKNKVRMICDCRANHVRVIQDENLPSELTLCGSTLRAPHGCHVQYMENMNSIASLVMSVVVNEGDEEAGPDDSSQHPDKRKKLWGLVVCHNTSPRFVPFPLRYACEFLTQVFAIHVNKEVELENQMLEKNILRTQTLLCDMLMRDAPLGIVSQSPNVMDLVKCDGAILLHKSQKHRLGITPSDYQIRDIISWLDEYHRDSTGLSTDSLYDAGFPGALSLGGGVCGMAAVRITDKDWLFWFRSHTASEIRWGGAKHEPNDRDDGQKMHPRSSFKAFLEVVKTRSLPW

SEQ ID NO: 35354 - protein, 466 aa, Melasma scabrum
SGKPFYAIIHRVTGSLVIDFEPVKPHEVPMSAAGALQSYKLAAKAIARLQALPSGSLERLCETMVQEVFELTGYDRVMVYKFHDDDHGEVFAEITRPGLEPYAGLHYPATDIPQAARFLFMKNKVRMICDCRSAHVKVVQDESLSSDLTLCGSTLRAPHSCHLRYMENMNSIASLVMSVVVNEGRDEESSASSSTSLHPEKRKRLWGLVVCHHTSPRFVPFPLRYACEFLSQVFSIHVGKELELLNQTLEKNILKTQTLLCDMLLRGNPLAIVTQSPTMMDLVKCDGAVLLYKGKNHRLGLAPSDLQIRDIMSWLDEYHRDSTGTSTDSLLDAGFPGAAALGDAFCGMAAIRITGRDWLFWFRSHTAAEVRWGGAKHEKGDEDDGRRMHPRSSFKAFLEVVKARSVPWRDFEMDAIHSLQLILRNACEKEMEEEERRKDMVVAGEIQARLTELHIDGAREMEAVTS

SEQ ID NO: 35355 - protein, 612 aa, Melasma scabrum
SGKPFYAIVHRVTGCLVVDFEPVKPHEVPMTAAGALQSYKLAAKAIAHLQALPSGSLERLCETMAQEVFELTGYDRVMVYRFHDDDHGEVYAEITRPGLESYAGLHYPATDIPQAARYLFMKNKVRMICDCRAAHVKVVQDEGLSSSLTLCGSTLRAPHSCHLRYMENMNSIASLVMSVVVNEGTDGESSSSPHQPDKRKRLWGLVVCHHTSARFVPFPLRYACEFLSQVFAIHVSKELDLLNQVIEKSILKTQTVLCDMLLRGNPLAVVGQNPTVMDLVKCDGAVLLYKGKNHRLGLAPTDPQIRDIVLWLNKYHRDTTGTSTDSLLDAGFPGAAALGDALCGMAAVRITGRDWLFWFRSNTAAEVRWGGAKHEKGDEDDGRKMHPRSSFKAFLEVVKARSVPWRDFEMDAIHSLQLILRNACEKEEERRKDVVVVGEIQSRLNDLNIYGAREMEAVTAEMVRLIEKASVPILAVGVDGVVNGWNTKIADLTGLPMDKAIGQHLLELVEEASADAVSRMLELVLQGQEEQNIQFEIKTHGPRAESGPISLVVNASATQDVKHNIIGVCFIAQDVTTERSMTDKFTRIEGDYRAIVQNRNPLIPPIFGSDEF

SEQ ID NO: 35356 - protein, 608 aa, Orobanche californica
  misc_feature (598)..(598): Xaa can be any naturally occurring amino acid
  unsure (1)..(608): unsure at all Xaa locations
SGKPFYAIIHRVTGSLIIDFEPVNPHEVPMTAAGALQSYKLAAKAITRLQALPSGSVKRLCDTMVQEVFELTGYDRVMVYKFHDDDHGEVFSEITKPFLEPYVGLHYPATDIPQATRFLFMKNKVRMICDCQANHVKVVQDDNLPFDLTLCGSTLRAPHSCHLQYMENMNSIASLVMSVVVNEGDEDGPDSSSGPNKRERLWGLVVCHNTSPRFVPFPLRYACEFLAQVFAVHVTKELEWENQLLEKNILRTQTLLCDLLLRNTPLGIVSGSPNVMDLVRCDGAVLLHKNTKYRLGLTPTDFQIQDIVSWLDEYHRDSTGLSTDSLYDAGFPGALALGNAVCGMTAARVTDKDWLFWFRSHTAGEVRWSGAKHEPGEKDDGRKMHPRSSFKAFLEVVKTRSLPWRDYEMDAIHSLQLILRNASRENDEKALEGREIQARLNVLQIDGVKEIEAVTSEMVRLIETASVPIFAVDLDGLVNGWNTKIADLTGLGVDEAIGSHFLALVEDSSADTVSKMLELALQGKEEQNVQFEIKTHGQRSESGPITLIVNACASRDVQENVVGVCFIAHDITTQKSMMDKFTRIEGDYRSIIQTRTRXSHLFSEPTSL

SEQ ID NO: 35357 - protein, 608 aa, Orobanche corymbosa
SGKPFYAIIHRVTGSLIIDFEPVNPHEVPMTAAGALQSYKLAAKAITRLQALPSGSVKRLCDTMVQEVFELTGYDRVMVYKFHDDDHGEVFSEITKPFLEPYVGLHYPATDIPQAARFLFMKNKVRMICDCLANHVTVVQDDNLPFDLTLCGSTLRAPHSCHLQYMENINSIASLVMSVVVNEGDEDGPDSSSGPNKRERLWGLVVCHNTSPRFVPFPLRYACEFLAQVFAVHVTKELEWENQLLEKNILRTQTLLCDLLLRNTPLGIVSGSPNVMDLVKCDGAVLLHKNTKYRLGLTPTDFQIHDIVSWLDEYRRDSTGLSTDSLYDAGFPGALALGNAVCGMTAARVTDKDWLFWFRSHTAGEVRWSGAKHEPGEKDDGRKMHPRSSFKAFLEVVKTRSLPWRDYEMDAIHSLQLILRNASRENDEKDSEGREIQARLNELQIDGVKEIEAVTSEMVRLIETASVPIFAVDLDGLVNGWNTKIADLTGLGVDEAIGRHFLALVEDSSADTVSKMLELALQGKEEQNVQFEIKTHGQRSESGPITLIVNACASRDVQENVVGVCFIAHDITTQKSMMDKFTRIEGDYRSIIQNPNPLIPPIFGTDEF

SEQ ID NO: 35358 - protein, 608 aa, Phelipanche ramosa
SGKPFYAIIHRVTGSLIIDFEPVKPHEVPMTAAGALQSYKLAAKAITRLHALPNGSMKRLCDTMVQEVFELTGYDRVMIYKFHDDDHGEVFTEITKPGLVPFAGLHYPATDIPQAARFLFMKNKVRMICDCRANHVKVIQDENLPFDLTLCGSTLRAPHSCHLQYMENMDSIASLVMSVVVNEGDEDGPDSSSGPDKRKRLWGLVVCHNTSPRFIPFPLRYACEFLAQVFAIHVNKELELDNQMVEKNILRTQTLLCDLLLRDAPLGIVSGNPNMMDLVKCDGAVLLYRITKYRLGLTPTDFQIRDIVSWLDEYHLDPTGLSTDSLYDAGFPGALALGDAICGMAAVRITDKDWLFWFRSHTAAEIRWSGARHEPGEKDDGRKMHPRSSFKAFLEVVKTRSLPWKEYEMDAIHSLQLILRNASKENKEKDMEKREIHARLNELQIDGAKEIEVVTSEMVRLIETASVPIFAVDLDGLVNGWNTKIADLTGLGVDEAIGRHFLALVEDSSADTVNKMLELALQGKEERDVEFEIKTHGQRSESGPITLIVNACASRDVNENVVGVCFIAHDITTQKSMMDKFTRIEGDYRSIIQNPNPLIPPIFGTDEF

SEQ ID NO: 35359 - protein, 250 aa, Vitis vinifera
MESLGVRKGAWIQEEDVLLRKCIEKYGEGKWHLVPLRAGLNRCRKSCRLRWLNYLKPDIKRGEFALDEVDLMIRLHNLLGNRWSLIAGRLPGRTANDVKNYWHSHHFKKKVQFQKEGRDKPQTHSKTKAIKPHPHKFSKALPRFELKTTAVDTFDTQVSTSSKPSSASPQPNDGIIWWESLLAEHAQMDQETDFSASGEVLIASLWTEETATQKKGPMDGMIEQIQGGEGDFPFDVGFWDTPNTQVNHLI

SEQ ID NO: 35360 - protein, 250 aa, Vitis vinifera
MESLGVRKGAWIQEEDVLLRKCVEKYGEGKWHLVPLRAGLNRCRKSCRLRWLNYLKPDIKRGEFALDEVDLMIRLHNLLGNRWSLIAGRLPGRTANDVKNYWHSHHFKKEVQFQEEGRDKPQTHSKTKAIKPHPHKFSKALPRFELKTTAVDTFDTQVSTSSKPSSTSPQPNDDIIWWESLLAEHAPMDQETDFSASGEMLIASLRTEETATQKKGPMDGMIEQIQGGEGDFPFDVGFWDTPNTQVNHLI

SEQ ID NO: 35361 - protein, 220 aa, Vitis vinifera
MESLGVRKGAWIQEEDVLLRKCIEKYGEGKWHLVPLRAGLNRCRKSCRLRWLNYLKPDIKRGEFALDEVDLMIRLHNLLGNRWSLIAGRLPGRTANDVKNYWHSHHFKKEVQFQEEGRDKPQTHSKTKAIKPHPHKFSKALPRFELKTTAVDTFDTQVSTSSKPSSTSPQPNDDIIWWESLLAEHAPMDQETDFSASGEMLIASTTTKIEINDALFYDAF

SEQ ID NO: 35362 - protein, 415 aa, Hordeum vulgare
MASAPASASAALSTAAPADNGAAKPTEQRPVQVAKRLEKFKTTIFTQMSMLAVKHGAINLGQGFPNFDGPDFVKDAAIEAIKAGKNQYARGYGVPELNSAVAERFLKDSGLHIDPDKEVTVTSGCTEAIAATILGLINPGDEVILFAPFYDSYEATLSMAGANVKAITLRPPDFAVPLEELKAAVSKNTRAIMINTPHNPTGKMFTREELEFIADLCKENDVLLFADEVYDKLAFEADHISMASIPGMYERTVTMNSLGKTFSLTGWKIGWAIAPPHLTWGVRQAHSFLTFATSTPMQSAAAAALRAPDSYFEELKRDYGAKKALLVDGLKAAGFIVYPSSGTYFIMVDHTPFGFDNDVEFCEYLIREVGVVAIPPSVFYLNPEDGKNLVRFTFCKDDDTLRAAVDRMKAKLRKK

SEQ ID NO: 35363 - protein, 516 aa, Gentiana scabra
MPIKMSPIYATLTLHLAAALFLFFHVQKLVHYLHGKATGHRLPPGPTGWPILGALPLLGNMPHVTFANMAKKYGPVMYLKVGSHGLAIASTPDAAKAFLKTLDLNFANRPPNAGATHLAYNAQDMVFAHYGPKWKLLRKLSNLHMLGGKALENWADVRKTELGYMLKAMFESSQNNEPVMISEMLTYAMANMLSQVILSRRVFNKKGAKSNEFKDMVVELMTSAGYFNIGDFIPSIGWMDLQGIEGGMKRLHKKFDVLLTRLLDDHERTSHERKQKPDFLDFVIANGDNSDGERLNTDNIKALLLNLFTAGTDTSSSIIEWALAELLKNRTLLTRAQDEMDWVIGRDRRLLESDIPNLPYLQAICKETFRKHPSTPLNLPRIASEPCEVNGYYIPKGTRLNVNIWAIGRDPSVWGDNPNEFDPERFLYGKNAKIDPRGNDFELIPFGAGRRICAGTRMGILLVEYILGTLVHSFDLKLGLPEEELNMDETFGLALQKAVPLAAMLIPRLPLHVYAP

SEQ ID NO: 35364 - protein, 173 aa, Hordeum vulgare subsp. vulgare
MANDSLTRAQIVGDVLDPFVSSVPLTVMYDGRPVFNGMEFRSPAVSLKPSVEIGGDDFRVAYTLVMVDPDAPNPSNPTLREYLHWMVTDVPASTNDSFGKEIVPYESPNPTMGIHRMVMVLYQQLGRGTVFAPQARQSFNSRSFARRFNLGKPVAAVYFNCQRPTGTGGRRFT

SEQ ID NO: 35365 - protein, 378 aa, uncultured bacterium
MDERIEIYSLSDIALILPLRDGMNLVSKEFVASRHDGTGVLILSELAGAAKELHEALLVNPNNLDEIAEAIREAVEMPNEEQVQRNKMMMQRLQRYNIHRWASEFMKSLEGVKEIQQVRLTRKVNTTRMHQIIDTYRVSKKRILFLDYDGTLSWFQENPEDARPDDQLYTILQHLTKDDKNTVVIISGRDKETLGLWFDNTWNIHFIAEHGVWIRDPGGEWHMLEQIDNDWKDPVQPLLEYYVDRTPRTFIEHKNFSLVWHYRNADPDLGLQRAWELKDELRTLTANLNLEIMDGDKVLEIKHAGINKGRAALQKMGNDRYDFIFAVGDDWTDEYTFESMPEESYTIKVGTKTTSAAYYIESVELVREMLCRFSQEEC

SEQ ID NO: 35366 - protein, 763 aa, Arabidopsis thaliana
MGWFNKIFKGSNQRLRVGNNKHNHNVYYDNYPTASHDDEPSAADTDADNDEPHHTQEPSTSEDNTSNDQENEDIDRAIALSLLEENQEQTSISVMDTGKYSMPVDEDEQLARALQESMVVGNSPRHKSGSTYDNGNAYGAGDLYGNGHMYGGGNVYANGDIYYPRPITFQMDFSVQQPNNLSTTCLHRICAGCNMEIGHGRFLNCLNSLWHPECFRCYGCSQPISEYEFSTSGNYPFHKACYRERYHPKCDVCSHFIPTNHAGLIEYRAHPFWVQKYCPSHEHDATPRCCSCERMEPRNTRYVELNDGRKLCLECLDSAVMDTMQCQPLYLQIQNFYEGLNMKVEQEVPLLLVERQALNEAREGEKNGHYHMPETRGLCLSEEQTVSTVRKRSKHGTGKWAGNITEPYKLTRQCEVTAILILFGLPRLLTGSILAHEMMHAWMRLKGFRTLSQDVEEGICQVMAHKWLDAELAAGSTNSNAASSSSSSQGLKKGPRSQYERKLGEFFKHQIESDASPVYGDGFRAGRLAVHKYGLRKTLEHIQMTASPKPREPYAASFEEETGEFDPNYSSGSHVCSYLADELLNSILRRLRLNPEACLEIFNLASKQQKFRPDYKAYCKMVHILSRARNYQQTKSYLCELVALNHSGFVVWGELVRVFKEFSFSPTVFDMILKVYAEKGLVKNALHVFDNMGNYGRIPSLLSCNSLLSNLVRKGENFVALHVYDQMISFEVSPDVFTCSIVVNAYCRSGNVDKAMVFAKETE

SEQ ID NO: 35367 - protein, 414 aa, Methylomicrobium japanense
MKIIKDKVAKLSFVALLVSVTAAMFYTPTASAHGEKSQAAFMRMRTIHWFDLNWSKDMVSVNETMSISGKFHVFAGWPETVDKPEVAFLNIGIPGPVFIRAGSWIGGQLVPRSVSLELGETYEFKVLLKARRPGDWHVHTMMNVEGGGPIIGPGKWVTITGSMGDFKNPITTLTGETIDLETYALDGVYGWHLFWYVLGVAWMVYWCRKPVFIPRRIAVDAGKADSLITPTDKKVGMAFAAGTMAIVAISMGQANEKYPVTTPLQAGLMRGIKSLELPQPTVSVKVVDASYRVPGRAMQMTLEITNNGDSAVRLAEFNTASVRFLDADVYEDDTNYPDDLLAEEGLSVSDNSPLAPGETRTVDVTASDAAWEVYRLADLIYDPDSRFAGLLFFIDEDGNRQMTMVDAPLIPTFI

SEQ ID NO: 35368 - protein, 232 aa, Zingiber officinale
YHPNIVKLRAAYEDADAVHLVMELCEGGELFDRIVARGHYSERSAAAVLRTVAEVVRMCHANGVMHRDLKPENFLYANKKENSPLKAIDFGLSVFFRPGERFSEIVGSPYYMAPEVLKRNYGPEIDIWSAGVILFILLCGVPPFWAETEQGVVRAILRGMIDFQREPWPPISESAKSLLKQMLNPDPRRRLTAQQVLEHPWLQNAKKASNVPWGDIVRARLKQFSVMNRFKK

SEQ ID NO: 35369 - protein, 203 aa, Catharanthus roseus
MSEEIISVSDRFLLSLIEEHLLSDNSDDSSSELTSTEENWEEIFADFLNWSGSEIQKRGSPSSESCQSNSMAESCQEDSVVGTPPEAAAGGGCSKDWNRYKGVRRRPWGKFAAEIRDPKKKGSRIWLGTYETPEDAALAYDAAAFNMRGAKARLNFPHLIGSNISGPVRVNPRKRFPAEPSTTSSSSSSSSSENSGGRKKRRY

SEQ ID NO: 35370 - protein, 366 aa, Primula vulgaris
MGYMCDFCGEQRSMVYCRSDSACLCLSCDRNVHSANALSKRHFRTLLCEKCNSQPTFVRCVEEKTSFCQNCDWLGHNVSEEASTHKKQAVNCYSGCPSSAELSMIWSFVLNGENDSNCEKRMSSMNISETQDECTVFDDVKKGDKSKTQMYSKTQMGNSTLSTMHCPGTKAPDICENDDFYKDFDIDEIDLTIENYEELFGVAFNDPQQLFGANGIGSMFRSKDMSTSDLNRQASSGQQGNTAQPTCSNGASADSSMSAKTEPIVCYSRQSNLSFSGVTGESSAGDFHEIGMGEPPPWGSPCSFPSTSRSSAVLRYKEKKKIRKFDKKVRYASRKARADVRRRVKGRFVKAGDVYDYDPLGRTRSY

SEQ ID NO: 35371 - protein, 366 aa, Primula vulgaris
MGYLCDFCSEQRSMVYCRSDSACLCLSCDRNVHSANALSKRHSRTLLCEKCNSQPAFVRCVEEKTSFCQNCDWLGHNVSEEASTHKKQAVNCYSGCPSSAELSMIWSFVLNGEDDSNCEKGMSSMNISETQDECTVFDDVKKVDKSKTQMYSKAQMGNSTLSKMYCPGTKAPDICENDDFYKDFDIDEIDLTIENYEELFGVAFNDPQQLFGANGIGSMFRSKDMSTSDVNRQASSGQQRNTAQPTCSNGASADSSMSAKTEPIVCYSRQLNLSFSGVTGESSAGDFHEIGMGEPPPWCSPCSFPSTSRSSAVLRYKEKKKIRKFDKKVRYASRKARADVRRRVKGRFVKAGDVYDYDPLGRTRSY

SEQ ID NO: 35372 - protein, 366 aa, Primula vulgaris
MGYLCDFCSEQRSMVYCRSDSACLCLSCDRNVHSANALSKRHSRTLLCEKCNSQPAFVRCVEEKTSFCQNCDWLGHNVSEEASTHKKQAVNCYSGCPSSAELSMIWSFVLNGEDDSNCEKGMSSMNISETQDECTVFDDVKKVDKSKTQMYSKAQMGNSTLSKMYCPGTKAPDICENDDFYKDFDIDEIDLTIENYEELFGVAFNDPQQLFGANGIGNMFRSKDMSTSDVDRQASSGQQRNTAPPTCSNGASADSSMSAKTEPIVCYSRQLNLSFSGVTGESSAGDFHEIGMGEPPPWCSPCSFPSTSRSSAVLRYKEKKKIRKFDKKVRYASRKARADVGRRVKGRFVKAGDVYDYDPLGRTRSY

SEQ ID NO: 35373 - protein, 331 aa, Primula vulgaris
MGYLCDFCSEQRSMVYCRSDSACLCLSCDRNVHSANALSKRHSRTLLCEKCNSQPAFVRCVEEKTSFCQNCDWLGHNVSEEASTHKKQAVNCYSGCPSSAELSMIWSFVLNGEDDSNCEKGMSSMNISETQDECTVFDDVKKVDKSKTQMYSKAQMGNSTLSKMYCPGTKAPDICENDDFYKDFDIDEIDLTIENYEELFGVAFNDPQQLFGANGIGSMFRSKDMSTSDVNRQASSGQQRNTAQPTCSAGDFHEIGMGEPPPWCSPCSFPSTSRSSAVLRYKEKKKIRKFDKKVRYASRKARADVRRRVKGRFVKAGDVYDYDPLGRTRSY

SEQ ID NO: 35374 - protein, 366 aa, Primula vulgaris
MGYLCDFCSEQRSMVYCRSDSACLCLSCDRNAHSANALSKRHSRTLLCEKCNSQPAFVRCVEEKTSFCQNCDWLGHNVSEEASTHKKQAVNCYSGCPSSAELSMIWSFVLNGEDDSNCEKGMSSMNISETQDECTVFDDVKKVDKSKTQMYSKAQMGNSTLSKMYCPGTKAPDICENDDFCKDFDIDEIDLTIENYEELFGVAFNDPQQLFGANGIGSMFRTKDMSTSDVNRQASSGQQRNTAQPTCSNGASADSSMSAKTEPIVCYSRQLNLSFSGVTGESSAGDFHEIGMGEPPPWCSPCSFPSTSRSSAVLRYKEKKKIRKFDKKVRYASRKARADVRRRVKGRFVKAGDVYDYDPLGRTRSY

SEQ ID NO: 35375 - protein, 366 aa, Primula vulgaris
MGYLCDFCSEQRSMVYCRSDSACLCLSCDRNVHSANALSKRHSRTLLCEKCNSQPAFVRCVEEKTSFCQNCDWLGHNVSEEASTHKKQAVNCYSGCPSSAELSMIWSFVLNGEDDSNCEKGMSSMNISETQDECTVFDDVKKVDKSKTQMYSKAQMGNSTLSKMYCPGTKAPDICENDDFYKDFDIDEIDLTIENYEELFGVAFNDPQQLFGANGIGSMFRSKDMSTSDVNRQASSGQQRNTAPPTCSNGASADSSMSAKTEPIVCYSRQLNLSFSGVTGESSAGDFHEIGMGEPPPWCSPCSFPSTSRSSAVLRYKEKKKIRKFDKKVRYASRKARADVRRRVKGRFVKAGDVYDYDPLGRTRSY

SEQ ID NO: 35376 - protein, 435 aa, Flavobacteria bacterium BBFL7
MILAAGTTGTIIATVAAFLLLTLLLVTLLLVVKQKLSPSGPVTINVNGERDLTTGSGSTLLSTLGDNKLFLPSACGGGGTCIQCKCIVKEGGGGILPTEEPHFSRKEIAEGWRLGCQVKVKQDMVIEIPEEVFGIKKWEAEVVRNYNVASFIKEFVVRLPEDMHYEAGGYIQIEIPECTVNFKDMDITAHPEEHETPDKFQAEWDKFNLWPLVMKNPETVERAYSMASYPAEGRDIMLNVRIATPPWDRAKNGWMDVNPGVASSYIFNQKPGDKVVVSGPYGEFFINESEAEMLYVGGGAGMAPMRSHLYHLFRTIKTGRKVTYWYGGRSKRELFYLDHFKALEKDFPNFKFYLALSEPLEEDNWKVKDGIDGEGDGFVGFIHNCVIENYLNHHDTPEDIELYFCGPPLMNQAVQKMGEDFGIPDENIRFDDFGG

SEQ ID NO: 35377 - protein, 395 aa, Flavobacteria bacterium BBFL7
MKNNLSDRINNLPVSATLAMAAKARELREQGKDIIGLSLGEPDFNTPDFVKDAAIQAINENYNSYTPVDGYVELKDAIILKFKRDNNLEYTRDQIVVSTGAKQSIANVAMVLLNEGDECILPAPYWVSYAAIVQLAEGVPVEVRAGVEQNFKITPDQLRAAITPRTKMILFSSPNNPSGSVYSKNELEELAAVLKDHPQIVVVSDEIYEHINYGDGHASMASVNGMYDRTVTINGVSKAFAMTGWRVGYIGAPAWIARACNKMQGQITSGTNCIAQRAVITALEAPVSEIQYMVDAFHKRRDLILELLSKIHGFITDIPEGAFYVFPDISSFFGKTIKGHKIENATDFSLLLLEEALVATVTGDAFGAPNCIRLSYAASEDQITEAIKRIDEVLS

SEQ ID NO: 35378 - protein, 770 aa, Flavobacteria bacterium BBFL7
MSKDSKRREALVYHAKPTPGKIKVVPTKKYSSQRDLSLAYSPGVAEPCLEIAKDKANVYKYTTKGNLVAVITNGTAVLGLGDIGPEASKPVMEGKGLLFKIFADIDCFDIEIDTKNVDEFIQTVKNIAPTFGGINLEDIKAPEAFEIEKRLKEELDIPVMHDDQHGTAIISSAALLNALEIADKKIEDVKIVISGAGSAAISCTNLYAKLGARKENILMFDVDGLITTSRTDLGPEQMEFARDMDPITLVDAFKGADVFLGLSVGNIVSPAMLLDMNENPIVFAMANPNPEIEYDTAIATREDLIMATGRSDHPNQVNNVLGFPFIFRGALDVRASKINEEMKLAACHAIAQLAKEPVPEQVNIAYGETKLNFGREYIIPKPFDPRLISTIPPAVARAAMESGVAMEPIQDWEKYEDQLLSRMGSDNKLIRLILNRARTNPKRIVFAEADNLDVIKAAQIVHEDGIATPILLGRRDVIEELMTEIDWDDKILIIDPKSDEEKPRKDRYANELWQMRARKGVTEFDAGKLMRQRNYFAAMMVKLGDADAVITGVAQSFPISVKPMMEIIGKSPGVQKVATTNLMITDRGPIFVSDTSININPDATELAKIAQMTARTARMFGIDPAVAMISYANFGSSDHPHARKVTEAVNYLHRYYPDITVDGEIQADFALNPELLKKKFPFSKLAGKKVNTLVFPNLESANSTYKLIKELYNTDSIGPIMMGMQKPVHILQLNASVDEIVNMAAVAVIDAQQKEKHEQKREQATRNSAN

SEQ ID NO: 35379 - protein, 225 aa, Flavobacteria bacterium BBFL7
MYAIVEIAGQQFKIEKDQKLFVHRLQEDEGATVSIDKVLLLGNDNDITLGAPAIEGAFAEAKVLGHLKGDKVIVFKKKRRKGYRKKNGHRQSLTEIQISSISASGGKKSAPKAEKKAPAKKAAPAKEVAPAAAPKAAKKSTSKGDDLKKIEGIGPKIASTLNEAGITTFAELAKTDAAKISEIIADVRGNHVTDSWPMQAQMAADGKWDELKKWQDEADGGVMPS

SEQ ID NO: 35380 - protein, 116 aa, Flavobacteria bacterium BBFL7
MLITVVKSKIHRVKVTGADLNYIGSITIDEDLMDGANIVEGEKVQIVNNNNGNRLETYAIPGPRGSGEITLNGAAARKVSPGDVLILICYAQMTMEEARAFKPTLLFPNEEDNTLS

SEQ ID NO: 35381 - protein, 569 aa, Flavobacteria bacterium BBFL7
MFHLNILKRAMSDTTKTNNFIEDIIEDDLNNGLSQDKLRFRFPPEPNGFLHIGHASAICLNFGLGEKYKRPVNLRFDDTNPAKEEAKYVAAIQKDVEWLGYKWDNLCYASDYFQELYDWAVQMIKDGKAYVDSQSSEEMAAQKGTPTQPGVDGPYRNRSVEENLSLFEGMKNGEYAEGEHILRAKIDMQSNNMLMRDPIMYRVVDKAHHRTGTDWKIYPMYDWTHGESDYLEQISHSFCTLEFKPHRELYDWFLDQVIDKDKIRPKQREFARRNVSHTVTSKRKLQKLVEAGVVNGWDDPRMTTISGLRRRGYTPASLKNFAESIGIAKRDNLVDMNHLEFHLRDDLNKTADRVMCVLDPVKLVITNYPDDQIEILQAENSQEDESRGFREVPFSKELYIEREDYREEANKKFFRLKNGKEVRLKNGYIIKGEGCLKDADGNITEIHATYDPDSKSGSGTEASMRRVKGTLHWVSAAQAVPVEVRLYDRLFTVPSPDTDKEKDFMEFVNPNSLEVITAMAEPAMKNLKVGDIVQFQRMGYFCVDPDSSDEKMVFNRTVTLRDTWAKLED

SEQ ID NO: 35382 - protein, 250 aa, Flavobacteria bacterium BBFL7
MLKIKDLHASIEDKEILKGINLEVKAGEVHAIMGPNGSGKSTLANVIAGREEYEMTGGSIELEKEEISELDPEERAHKGVFLSFQYPIEIPGVSVTNFMKTAINETRKAQGKEEMKAGDMLKMIREKSEMLEIDRKFLSRSLNEGFSGGEKKRNEIFQMAMLEPKVSILDETDSGLDIDALRIVANGVNKLRSKDNATIVITHYQRLLDYIVPDYVHVLYKGRIVKSGGKELALELEERGYDWIKEEVEA

SEQ ID NO: 35383 - protein, 426 aa, Flavobacteria bacterium BBFL7
MKIFKFGGASVKDADGVRNVVQVVQTMGFDGLGIVVSAMGKMTNALEDIITHYQKNDNSYLSMIDALFSKHLDIVVELESNGASEDVLVRFRESELKKELKATIESLKGTMLRNQSKNHAFIYDQVVSHGELLSTMIVASYFNAHHIPVQWMDARQLIKTDQKYRDAAVDWKETEKAIKSNCSGKLFLTQGFIGADENGFTTTLGREGSDYTAAILAYALDATHVTIWKDVPGVLNGDPRVFDNTVLLEQISYREAIELAFYGASVIHPKTLQPLQGKQIELRVKSFLNPKAQGTVIKEGDALQPMTPCYIVRNNLVFLEISARDFSFIGEHNISDIFHRLSESKMQVGLLQNSAISFTICVEDKYNKLAELLEGLEARYKVNAVTDVSLYTIRHHSDNAIESIENGKDVLLRQRTQETLQLVVKG

SEQ ID NO: 35384 - protein, 313 aa, Flavobacteria bacterium BBFL7
MTNIMTEAKLFGCRQSMDLAKAVAEKYGASLGQVNFSTFSDGEFQPSFEESIRGRRIFIIGSTHPSSDNLMELLLMLDAAKRASARHITAVIPYFGWARQDRKDKPRVPIGAKMIAKILESAGATRIITMDLHADQIQGFFEKPVDHLFGSALFIPYLKSLNLSDLTIASPDMGGSKRAYAYAKTLESDVVVCYKQRQKANVISHMELIGDVTGKNVVLVDDMVDTAGTLTKAADVMMERGAKSVRAICTHAILSGQAYERIENSQLEELIVTDSIPLRKESKKIKVLTCAGLFAEVMTSVQNNESISSNFIM

SEQ ID NO: 35385 - protein, 360 aa, Flavobacteria bacterium BBFL7
MNNIHIYLFGLGNVGSTLIKQILESQRFFKVSQGLDLKIVGLANSRKVLTVTDGIDEDWEQVFVEQSVTRRPDAFYEFATIDDEVRIAVDATASKELSHFYPELIEQGFHVVTANKIANTLSQEFYDDLRRLLKQKELSFEYETNVGAGLPILDTIRNLHKSGEEIFAVNGVFSGSLGYIFNRFSIENQPFSQIVKDALKNGFTEPDPREDLSGNDVARKLLVLAREAGLKIEFSDISIENLVIPDLQTASANHFLERIGELDAALQKCKNALQEDEVLRHLGKLDVVNRSLKVTLQAVKKDSPAGQLQGSDGFFEIYSESYATNPLIIKGAGAGREVTARGLLADIIKIAKSCPIVIYR

SEQ ID NO: 35386 - protein, 311 aa, Flavobacteria bacterium BBFL7
MSNSNYAGIPDEYAGLDNASIVLIPVPYDGTSTWQKGADKGPEAFLDASANMELYDIETDTEVYHHGVFLADAVTENSSPEAMVDAVHATTKKYIKKNKFVTLFGGEHSISIGSIRAFNEMYENLSVLQIDAHADLRKEYDGSSCNHACAVYEASQKTNLVQVGIRSMDSIEVGINDDDKIFLAHEMVQDDYWQEKATEALTENVFITIDLDAFDPSICPSTGTPEPGGLFWYETLDFLKMVFAEKNVVGFDIVELCPNPSEKSSDFLAAKLYYKMLSYKFKDIALEGEDGYEANNAFTKSGLKKMKNIED

SEQ ID NO: 35387 - protein, 335 aa, Flavobacteria bacterium BBFL7
MTEGNFVDYTKVHLESGRGGKGSTHLHREKYIDKGGPDGGDGGRGGHIILRGSKNLWTLYHFKYKRHFKSAQGGNGAKQRRTGEDGDDVYIDLPLGTVVKDSETGNVIYEMLEDGAEFVICEGGKGGRGNWHFKSSTRQTPRYAQQGMEGTSLDAIFEMKVLADVGLVGFPNAGKSTLLSVITSAKPKIANYEFTTLKPNLGIVEYRDFKSFVIADIPGIIEGAADGKGLGHRFLRHIERNSTLLFLIPADSDDISAEYDILLKELKKYNPELLDKNRFVCISKADMLDEELMEQMKEGLDEEGAFDGAPYMFISSLSQFHMQELKDRLWQMLNE

SEQ ID NO: 35388 - protein, 230 aa, Flavobacteria bacterium BBFL7
MSTKCENCVIRQYNALRVLNTEDLVEINETKELQSISKGDMIFKEGQRLSGIYCVRNGATKLSKITASGRDQIIKIASKGEILGQRSIVCEENANLSATALNDMEVCFIPKSAIKSRIAHNPLFVKELLVTMATELRVADNMIIDLSQETVKQRLAQALLYLKNQFGEDPNTGDLTLVLSREDLAAAIGTATESCIRLLSDFKKKGYITTQGKNIKILQLEALEELTKDF

SEQ ID NO: 35389 - protein, 218 aa, Flavobacteria bacterium BBFL7
MISFNAFIDSISKIKKMPLPGFETQLKMAAVDRLEELQRKSLLNKTPRKAAVMMLIYPKNNIAHFVLIERMISKGAHSGQIAFPGGRQESEDQNDSITAIRETHEEVGINPELQEIITAGTPIFIPPSNYMVSPFLAFAKAELKFTPQPSEVKSIIEVPLHELMDSRSIKHHTLSTSYVTDLTVPCYNLNNQIVWGATAMMLAEFRAILKDSLPLSDE

SEQ ID NO: 35390 - protein, 217 aa, Flavobacteria bacterium BBFL7
MKFFIDTANLDQIAEAQSMGVLDGVTTNPSLMAKEGITGSKNILNHYKKICDIVDGHVSAEVISTDFDGMVKEGEALAAMNDQIVVKLPMIKDGVRACKYFSDKGIKTNVTLVFSPGQALLAAKAGATYVSPFIGRLDDISTDGLNLIAEIRMIYDNYGFDTEILAASVRHTMHVIDCAKLGADVMTGPLSSIEGLLKHPLTDIGLAKFLADYKKGN

SEQ ID NO: 35391 - protein, 321 aa, Flavobacteria bacterium BBFL7
MDTENNILEVAKRTIRIESAAVKNLENSLDSAFAKAVNHIHTAQGRVIITGIGKSAIIAMKIVATMNSTGTPAIFMHAADAIHGDLGIIQKNDVVICISKSGNTPEIKVLVPLIKNFENKLIAITSHQDSFLGKEADFVLHAPIEEEACPNGLAPTTSTTAQLVVGDALAICLLELKGFTDKDFARYHPGGALGKKLYLRVQELIDQNAKPQVTSNSTLRDVIVNISENRLGMTVVVDETKLIGIITDGDLRRMLSTGKNIDSLTAADIMTTSPKTIDADDMAVQAREVMEEYNVSQLVAVNKDGYAGVVHIHDLIREGIL

SEQ ID NO: 35392 - protein, 403 aa, Flavobacteria bacterium BBFL7
MKNTYIIDGVRTPIGNYKGTLSTIRPDDLAAHVIKTVVDRNPNIPTDAYADVIMGCANQAGEDNRNVARMAGLLAGLPVTVPGETVNRLCSSGLSAIVHAHRAIQTGDGEVFISGGVENMTRGPLVIAKPSSAFGTDSKMYDSSFGWRFVNHKMAEMYGVDGMGNTAENLVEKFTISREDQDAFAAWSQQKATAAQQSGRLAKEIVAVEIPQRKKDPIIFKDDEFIKPTTTKEVLAKLRPAFKKEGGSVTAGNSSGLNDGAAATIIASEDAVKKYDLKPIARVVSSAVVGVEPRIMGIGPVTASNKALEKAGLTLADMDVIELNEAFASQALACTRAWGLADDDPRLNPNGGSIAIGHPLGVTGTRLAYSAALELQLTNKKYALITMCVGVGQGYAMVIENVS

SEQ ID NO: 35393 - protein, 358 aa, Flavobacteria bacterium BBFL7
MSNFHNITLSHVYKETDDTTVIAFDVPQELKEEFKYRPGQFLTLRAIINGEDLRRSYSLCSSPLDNEWKVAVKEIFEGKFSTYVNRELKSGDVLQVAAPSGDFGIESYGENKAKNYIAFAAGSGITPMLSIIKTHLAQEPNAKFKLFYLNRTVKSIIFKEEIEALKNKYLSRFEVFYFLSREHRDIPLFNGRFDQEKLQTLTQTLINAPHTDHAFICGPEEMIFLIRDELVAAGMKKENVHFELFVSGLSEEDKARAAAALEQKVDGVDVTIIDGSKEFHFVLGDDFDNVLDGAIGAGADLPYACKGGVCSTCKCKVVEGSVAMKVNYALTDEEVEKGFVLSCVSVPTSKKLVVDYDV

SEQ ID NO: 35394 - protein, 383 aa, Flavobacteria bacterium BBFL7
MRQVYLDSAATTQMRTEVIDEMTRVMQEVYGNPSSTHSYGRSAKSLIENARKNIAAQLGVTAAEIIFTSGGTEADNLAIHSCVRDLGVQRIITTKIEHHAVLYIVDYCKEKYGTQIEYLDLQECGTPSYDHLEELLKDESQKTLVSLMHINNEIGNKLDIDRVGNMCKKYNTLFHSDCVQSIGHYEMDFSKLPVDFTAVSAHKFHGPKGVGFAFIRKGTGLKPLILGGAQERGYRAGTESVHNIVGMDKSLSMAYENLEKEREYVKDLKDYFKAQLLEKIPGVKFNGNCGDHENSTFTLLNVCLPCPADKAAMLLFTMDLKGIACSKGSACQSGSQKGSHVLTNVLADEDLNKPSLRFSFSIFNTKEELDYVVDVLVEYLESI

SEQ ID NO: 35395 - protein, 399 aa, Flavobacteria bacterium BBFL7
MSQHLSPFTKDQLLPQEERLEIQRSKQELLIGIPKETQHQEKRIVLTPDAVAALTAHGHRILMEKGAGKGSNFTDSQYNEAGAELTSDRNKVFSCPTILKVAPPSLDEIELIKSQSVLISALQIKTRNKKYFEKLAAKKVTALAFEFIQDDSGNYPAVSALSEISGIASILIASELLSSGANRTGQLFGNITGVPPVDVVIMGAGVVGEFAARTALGLGANVKVFDNSITKLRNLQDKVSQQLYTSTLQPKYLLKALRRCDVVVGALSGSNRAPVVVTKTMVENMKQGSVIMDISIDMGGCFETSEVTTHDKPTFEKYGVTHYCVPNIPSRYSKTASISLSNIFTPYLLNIAEDGGIEHAIRMDKGLKCGIYMYHGINTNKSVGSWYNLPYSDVNLLIF

SEQ ID NO: 35396 - protein, 445 aa, Flavobacteria bacterium BBFL7
MLVLKFGGTSVGSVENMTHVKNIINDGTKKVVVLSAMSGTTNALVEISEHIRLKERDSAHVLIQQLASSYQNTIEQLLNDSALINESQEYVNKVFAGLIELVNSEHTTLIYNQIVAQGELLSTFLFSRFLMQEGINAALLPALDFMRIDNNDEPDSFYIKQSLNRILNENSEADIYITQGFICLDVQGNISNLQRGGSDYTASIVGAAIEANEVQIWTDIDGFHNNDPRFVENTTAISNISFDEAAELAYFGAKILHPQTVIPVKDLNIPVRLKNTMSPDSYGTLITHHVHGEGIKAIAAKDGIYAIKIKSARMLQAHGFLKKVFEIFEKYETSIDMITTSEIAVSLTIDNPLHLDVIVEELEKVASVDVDQGMSIVCLVGNNIIYHQDTPHLFQVLQDVPVRMISYGGSNNNISLLINTDQKLNTLQKLQGYVFESQLEKAVAY

SEQ ID NO: 35397 - protein, 868 aa, Flavobacteria bacterium BBFL7
MNMNQLTIKSQEALQAAQQLAQESGHQFIENLHLLKGMIQIDENVLPFIFKKLNVNLTLVIQLIDSSLTALPKVEGGDIQLSRDASRTVNSAMSIATKMDDEYVSLEHLLLSLFDSKSTAARILKDQGISKNQLEKAIEELRQGSRVTSASAEETYNSLNKYAKNLNQLADQGKLDPVIGRDEEIRRILQILSRRTKNNPMLVGEPGVGKTAIAEGLAHRIVGGDVPDNLKNKQIFSLDMGALIAGAKYKGEFEERLKAVIKEVTESSGDIVLFIDEIHTLVGAGGGQGAMDAANILKPALARGELRAIGATTLDEYQKYFEKDKALERRFQRVLVDEPDTESAISILRGIKDKYETHHKVRIMDEAIIGAVELSQRYITNRFLPDKAIDLMDEAAAKLRMEINSKPEELDVLDRKIMQLEIEIEAIKREKDESKLKALRSELANFKESRNEINAQWVNEKDIVDAIQNAKSDIENYKQQAERAEREGDYGQVAELRYGKIKDAQEELDRLQKEVALNDTGKSLIQEEVTYDDIAEVIAKWTGIPVTKMLQSERDKLLKLEDELHKRVVGQQEAIIAVSDAVRRSRAGLQDQKKPVGSFLFLGTTGVGKTELAKALADYLFNDENSMTRIDMSEYQERHSVSRLVGAPPGYVGYDEGGQLTEAVRRKPYSVVLLDEIEKAHPDTFNILLQVLDEGRLTDNKGRVADFKNTIIIMTSNMGANLIQDRFEKANTVTESLLEETKKEVLIALKQRVRPEFINRIDDIVMFTPLTKNEIQQIVSLQLKGVTKMLALQGITIDATPAAIELLAVQGYDPQYGARPVKRVIQKNVLNELSKQILSGEISTESIVLIDAFENQIVFRNETDAVEV

SEQ ID NO: 35398 - protein, 351 aa, Flavobacteria bacterium BBFL7
MVMKKVLIIEDDTALRENTAELLELSDYEVITAPNGRAGIELAKKNKPDVVVCDIMMPEVDGYGVLEALSLDTSTNQIPFIFLSARTDHKEVRKGMDLGADDYLTKPFEEEELLKAIETRLAKAGVFKTLLNNIPQSSSDEDQLRNLNELKNFFDDNGEELSFKKGEVIYQEGSRSFRIYLITRGVVKTYQIDKSGKELITSLFKEDEFLGFTSILDNVAYEESAEALEDVKLVGVSKSVLKDILDNNNNLSMELLQLLSHNVAHVKSQLLQMAYSSVRKKTAQTILQFASVYNKDAQEDISITRNDLASVAGIATESLIRTLSGFKKDGLIEIEGRSIKIINLSGLEKVE

SEQ ID NO: 35399 - protein, 398 aa, Flavobacteria bacterium BBFL7
MNNNKKLVIAYSGGLDTSYCAVYLSQDLGYEVHAVCVNTGGFTQEDLKTIESNAYKMGVSTFKAIDAVSTFYDKVVKYLIYGNVLKNNTYPLSVSAERIVQAIEIIEYAKTIDAQFIAHGSTGAGNDQVRFDMIFQTLAPHIEIITPIRDGKLSRKQEIDYLKENGIAMSWEKSQYSVNKGLWGTSVGGAETLTSLKALPEEAYPSQLQKEGKEQVKLAFKKGELIAVNGKEQSSELVIQQLNDLASSYAIGRDIHVGDTIVGMKGRVGFEAAAALITIKAHHLLEKHTLTKWQLQHKDYLSSFYGMHLHEGQYLDPVMRDIETFLESSQSKVTGDVYVTLQPYHFTLDGIESVNDLMNAKFGTYGEENKAWTASEAIGFIKIIGNSNKIYNQIHQES

SEQ ID NO: 35400 - protein, 361 aa, Flavobacteria bacterium BBFL7
MIVGIPKEIKNNESRVSMTPAGVFELTKNDHEVYIQSTAGKGSGFFDKDYENAGATIVNTIEEVYAISDLIVKVKEPIQYEYNLVKEGQLLFTYFHFASSEALTNAMIKAKAICIAYETVEDQEGTLPLLTPMSEVAGRLAIQQGAKYLEKPVKGRGVLLGGVPGVAPGKVLVLGAGVVGIQAAKMAAGLGAHVTIMDINMKRLRYVNDVMPPHVVTEFSNEFNIRKHIKTHDLIIGGVLLKGAKAPNLITRDMLKEMRPGTVIVDVAVDQGGCVETTKPTTHENPTYIIDDVVHYTVANMPGAVPYTSTVALTNVTLPYVLQLANYGWEKACSQNPSLEKGLNIISGKVVYREINEAFGW

SEQ ID NO: 35401 - protein, 606 aa, Flavobacteria bacterium BBFL7
MNYFKEILKYAKPYRRFGVLNIFFNILYALFAALSFASLIPMLDVLFDKTKSITVEPDWPGITKLLDYLTDYMGWYITTQVDGGKETALIVVIALVIILFFLKNIFGYLAMYFIAFLRNGILRDIRNDLYSKIVNLPISYYSEKRKGDVIARTSSDVLQIQNSFLSILELIVKEPLNIIFSLAFMLMISVKLTIFMLLFLPISGFLISLIGKKLKRQSGKVQKEQGIFLSLLEETLSGLKVIKGFNAEDRLTDTFKESTERYNKYAIQLNHRKGLASPTSEFLGILVIGILLWFGGRMVLVENAIDGTKFITFMLFAYGILTPAKALSKASYGVKEGNASAERVLEILKTKNEIADRAGAVSIPAFTTAVKVNDVTFSYEEEPVLKNFSLDIPKGTSIALVGQSGSGKSTIANLLTRFYDVEKGTITIDGKNIKDVTLKSLRDQIAIVTQDSILFNDTIATNVALSDKNATEEQVINALKIANAWEFVKDLPQGIHTNIGDSGNKLSGGQKQRLSIARAVLKNAPILILDEATSALDTESERLVQDALEKVMQNRTSIVIAHRLSTIQNADNIVVMNKGEIAEQGTHAELIAMKGLYNGLVGLQSL

SEQ ID NO: 35402 - protein, 391 aa, Flavobacteria bacterium BBFL7
MNKVVIVSYARTPIGSFMGKLSTVPATQLGSIAIKGALDKIKLDASLVEEVIMGNVVQAGTGQAPARQAALAAGLSNEVPCTTVNKVCASGMKTVMMAAQAIACGDKEIVVAGGMENMSMIPHYVHMRTGQKFGPASLIDGMQKDGLVDAYDQNAMGVCADLCAEEHGFSRSDQDDFAVQSYNRSAKAWKEGKFNDEVVPVNVPQRRGDDIIVDHDEEYTNVKMEKIPALRAAFTKEGTVTAANASTINDGAAALILMSEAKAKSLGLTPLATILSYADAAQEPKWFTTAPAKALPIALDKAGITKDEVDFYEFNEAFAVVGLANMKILGLKDSNVNVYGGAVSLGHPLGCSGARIITTLLSVLKQENGSIGAAAICNGGGGASAMVIKKG

SEQ ID NO: 35403 - protein, 513 aa, Flavobacteria bacterium BBFL7
MIDFILNLAWYWWLVIIVVLVGIYDIFNKKHIILRNFPVVGHFRYWLESVGPELRQYIVANNREELPFNRIERGWIYASAKNENNYEGFGTDRDIYAHQYIFINNSMMPYKVEKDHISHTEPTFLPCAKVIGAAKKRRRPFRPASVINISAMSYGSLSAKAVDAMNNGAKQVHAYHNTGEGGLSPYHKRGADVVFHIGTGYFGVRDKDGNFSMDMLKKLVKDNPQVRAIELKLSQGAKPGKGGVLPGSKITKEISEIRNVPMGEDVLSPPTHSAFEGIQGLVDFVEEIAQETGLPTGIKAAIGKLEQWEELADIMKATGKGPDFITVDGGEGGTGAAPPSFADHVSLPWVYGFKDLYQVFQNREMTEELVFIASGKLGFPAKAAMAFSMGADVVNVAREAMISIGCIQAQACHNNSCPTGIATQNKWLQRGIVVPEKAGRLASYFKKFNKELLEITHAAGYEHPCQFDMRDVDVSIGDTNMTQTLEYTYKYQKTPVPFESMQSLKDCVHLGGK

SEQ ID NO: 35404 - protein, 610 aa, Flavobacteria bacterium BBFL7
MEQKSIDWKSIVGMGLIFIILMYWFSQNQADVEANPETTTETSAATQDTTPQLTSNNEPAAAPISNGVFQAGSNEVITFENDLIQFKIDSKGALIQEALLKSYKTYDSLPVYLAKPNEKDHQLDLVFVTNDGRKMHTKDMSFTPSQSMNGENKVLSFKANVGPSQFLEFRYELQPKNYMMDFTIRSQGLSQTFNTADAPQLNWEMLAYKRSKGMDNENRYTEIKFEYGDGSDDYTGQGAEADEEEDKVSYIAYKQHFFTSILLTDTPFKKAKLISENIASQDDEQDTYTKKFNSQIELEYTGGELAYNMDWYFGPTDYDILDGYERNLDEVVDLGWGIFGWINEFVIRPLFSLLTKNAGIPYGIAIILLTICVRIILSPVLYKSYMTQAKMKILRPELNRIAEKYKDNAMKKQQETMRIQSEAGASPLSGCLPGLLQMPVFFALFKFFPTAFDLRQKSFLWADDLSSYDEIFKLPFNIPFYGDHVSLFPILASIAIFFYMQMTTGQTMQNTQQPGMPNMKFIMYLSPLFMLVFFNNYASGLSLYYFVSNLITIGIMLVIKNFVIKEEKVLAKIEKAKAAPKKKKGRFASKMSEIMEQAQAQQEEQKKGKK

SEQ ID NO: 35405 - protein, 633 aa, Flavobacteria bacterium BBFL7
MSKIIGIDLGTTNSCVSVMEGSEPVVIPNAEGKRTTPSVIAFVEGGEIKVGDPAKRQAVTNPTKTVASVKRFMGNKFSESSKEAARVPYNVVKGDNDTPRVDIDGRLYTPQELSAMILQKMKKTAEDYLGQEVTGAVITVPAYFNDSQRQATKEAGEIAGLKVERIINEPTAAALAYGMDKKDTDQKIVVFDFGGGTHDVSILELGDGVFEVLSTDGDTHLGGDDVDQKIIDWLADEFKAAEDIDLRQDPMALQRLKEAAEKAKIELSSSAQTEINLPYVTATASGPKHLVKTLTRSAFEKLINDLVKRTIEPCQTALKNAGLSTGDIDEIILVGGSTRIPAVQEAVEKFFGKAPSKGVNPDEVVAIGAAIQGGVLTGDVKDVLLLDVTPLSLGIETMGGVMTKLIESNTTIPTKKSQVFSTAADNQPSVEIHVIQGERSMAADNKTIGRFHLSDIPPARRGTPQIEVTFDIDANGIIKVSAEDKATGKKQDIRIEASSGLSEEEIEKMKQDAAANADADAKAKETADKLNAADQMIFQTEQQLEEFGDKLPEDKKAPITEALTELKAAYETKDIAVIDPALEKLNTVWTAASEEMYKAQADAQGGQPGPDAGADQAADNTSDVEDVDFEEVK

SEQ ID NO: 35406 - protein, 397 aa, Flavobacteria bacterium BBFL7
MMKTAYIVAAKRTAVGKAPKGVFRFKRPDELAAETIEAMLKDVPNLDKTRIDDVIIGNAMPEAEQGLNMARLISLMGLKIDDVPGVTVNRYCASGVETIAMATAKIQSGMADCIIAGGAESMSYIPMGGYKPTPDYRVAKAGNEDYYWGMGLTAEAVANEFNVSREDQDQFAYNSHQKALKAQAEGRFQDQIVPIDVEETFLNADGKKETRTYTVNKDEGPRADTKLEILAKLRPVFAAGGSVTAGNSSQMSDGAAMVLVMSEEMVKELNLEPIARMVNFAAAGVPPRIMGIGPVKAIPKALKQAGLTLNDVDMIELNEAFASQSLAVIRELGLNPDIINPNGGAISLGHPLGCTGAKLSVQLFDEMRKREMKSKYGLVTMCVGTGQGACGVYEFLN

SEQ ID NO: 35407 - protein, 673 aa, Flavobacteria bacterium BBFL7
MSEQNKSNQRPGNGKPILPGGGKPKFNVWWIAVPIVLAFLAYSLISDAVNSPKETNKSEFFSYLEDGDVKEVIVWNGRYAEVFLTKEALSNETKHKDALKPSAMNQGKVPQYKFEFGDLEIFQPQLEEAVENNNLETTVVFKTQDNTFMNAIWSFLPIILLIGVWIFIMRRMSGGGAGGGGGQIFNIGKSKAKLFDQKTDVKTTFKDVAGLEGAKEEIQEIVDFLKNPEKYTSLGGKIPKGALLIGSPGTGKTLLAKAVAGEAKVPFFSLSGSDFVEMFVGVGASRVRDLFKQAKEKSPSIIFIDEIDAIGRARGKSNFSGSNDERENTLNQLLTEMDGFGTNTNVIVLAATNRADILDKALMRAGRFDRQIYVDLPDVKEREEIFEVHLRPLKKVDNELDTSFLAKQTPGFSGADIANVCNEAALIAARKGKKAVDKQDFLDAVDRIVGGLEKKNKLITPSEKKTIAYHEAGHATVSWMTEHAAPLIKVTIVPRGQSLGAAWYLPEERQIVRPEQMLDEMCATMGGRAAEKVIFNNISTGALSDLEKVTKQARAMVTIYGLNDKVGNITYYDSSGQQEYSMSKPYSEETAVIIDQEISKIIEAQYQRAIKILEENKDKLTQLAEVLLEKEVIFKDDLENIFGKRPFIKEEAVALKSSTRSIAPTTNSKEEEE

SEQ ID NO: 35408 - protein, 554 aa, Flavobacteria bacterium BBFL7
MCGIVGMFQLKKDSQEQREKVLELSKKLRHRGPDWSGIYCGDKAILAHERLTIVDPQSGGQPLYSPDGKIVLAVNGEIYNHQKIRNHYKDTYEFKTKSDCEVILALYQDKGVDFMDELTGMYGFALYDSDKDVFLCARDHQGIIPLYYGTDDLGQFYVASELKALEGTCNEIAPFPPGHYYYSETGEFVKWYNREWKDYDAVKDNTSSVADLKQAMEDSVHRHLMSDVPYGVLLSGGLDSSIVSAVAKKYAAKRIESGDNKEAWWPQLHSFAIGLEGSPDLAAAQEVADHIGTVHHSVNFTIQEGLDAIKDVVYYLETYDVTTIRASTPMYLLARVIKSMGIKMVLSGEGSDEIFGGYLYFHKAPNAEEFHKETVRKLDTLHLYDNLRANKSLAAWGIEGRVPFLDKEFMDVAMRLNPEDKMCGGGKMEKHILREAFEDYLPHSVAWRQKEQFSDGVGYSWIDTLKEVVNDVVTDDMMEAAPFKFKINPPKNKEEYYYRSIFSEHFPSDTAASCVPSLKSVACSTPVALEWDEAFKNMNDPSGRAVSGVHDEGY

SEQ ID NO: 35409 - protein, 300 aa, Flavobacteria bacterium BBFL7
MKEKVEHKAGFVNIVGNPNVGKSTLMNALVGERLSIITSKAQTTRHRILGIVNGEDFQIVLSDTPGIIKPAYKLQESMMEFVKNAFEDADCILYMVELGEKELKNEAFEKRLTYAEVPVIVLINKIDKGQASQLEEAVEHWKVRLPNAEIFAISALENFGVPQLMARIVEILPASPAFYPKDALTDKPERFFVNESIREKILIHYKKEIPYSVEIDTEEFFEDEDIIRIRSVIMVERETQKGIIIGHKGAAIKRVGTEARKDLQKFFGKQVHIELYVKVNKNWRSNEKQLRRFGYKGENK

SEQ ID NO: 35410 - protein, 387 aa, Flavobacteria bacterium BBFL7
MANILLIEDEAAIRRVLSKILSEENKNYTVTEAVDGLEGIEYIKKEDYDLVLCDIKMPKMDGVEVLEAMKKIKPEIPVVMISGHGDLDTAVNTMRLGAFDYISKPPDLNRLLNTVRNALDRKSLVVENKRLKKKVSKNYEMIGDSELIVIIKNIIEKVAPTDARVLITGGNGTGKELVAHWLHEKSQRSAAPFIEVNCAAIPGELIESELFGHVKGSFTGANKDRAGKFEAANGGTIFLDEIGDMSLNAQAKVLRALQENKIQRVGSDKDIKVDVRILAATNKDLKKEISENKFREDLYHRLAVILINVPSLNDRREDIPLLIKHFAAKIAKEQGGTTKEFSNKAVGKLQNYDWTGNIRELRNVVERLIILGSEEISESDVNSFASK

SEQ ID NO: 35411 - protein, 328 aa, Haemophilus influenzae
MLHFAQIFQNKDHIMNTTKPFPIPTGYFGIPLGLAALSLAWLHLENLFPAVRMVSDVLGIVASAVWILFILMYAYKLRYYFEEVRAEYHCPVRFSFIALIPITTMLVGDIIYRWNPLIAEVMIWIGTIGQLLFSTLRVSELWQGGVFEQKSTRPPFYLPAVAANFTSASSLALLGYHDLGHLFFGAGMIAWIIFEPVLLQHLRISSLEPQFRATIGIVLAPAFVCVSAYLSINHGEVDTLAKILWGYGFLQLFFLLRLFPWVIEKGLNVGLWGFSFGLASMANSATVFYHSDVLQGVSIFVFVFSNVMIGLLVLMTIIKLAKGQFFLK

SEQ ID NO: 35412 - protein, 480 aa, Desulfitobacterium hafniense Y51
MSILEEENVLNLGHKLLQYEAQKLISFHTPGHKGKAEFFTDLHFPDQDLTELPGLDMLHSPAGVIAQAQARAAAVYQSDASFYLINGATVGNQGMFMALAGTGKRGKDLQLPKVLVERQSHRSVFSALVLSGCEPEYIPSVVHPEFGLPLGLKSIAEVDLGEFLGVHLTYPGYYGTLPDLAMIAAQRDRQAVQVSILVDQAHGSHYLSPLFPKGALAYGADLVLCSTHKTLSALTQAAMLHVQGSRIPLSALKEALELLQSSSPSYLLMASLERAVEHALESRRWELLHEAVQELHHRVGGSLRILNPQDVGTYGIAGLDWTKIMINTQRLGVAAPRCVEHLRKSYGIDPELWDDKNILFLLGIGNTPEEVEILTKGLLSLASLNKDVVASPEEMVFEIPLPPVRLTPRQAYFARKRKIPLAESVGHIVGESISPYPPGIPWIVMGEEMTPEILELLTRHKGRWQGWEDAGQGVWIIEEV

SEQ ID NO: 35413 - protein, 313 aa, Desulfitobacterium hafniense Y51
MSVKELKIFCGNANRALAEEIVDYLGVPLGEAKVKRFKDGEITIAIDESVRGADVFVVQPTCNPTNDNIMELLIMIDALKRASARRITPVIPYYGYARQERKSKARDPITAKLMANLITTAGADRVVTMDLHAPAIQGFFDIPVDHLPGVPILAEYFKSKELENVVVVSPDHGGVQRARNLAERIGAPLAIIDKRRPEPNVSEIMNVIGDIQGKQVIMIDDIIDTAGTITQGAQALKDRGAQDVYACCTHPVLSGPAFERLENSVIKEVVITNTIPVHPEKMISKIKVLSVAPLLGAAIVRIHEDLSVSKLFS

SEQ ID NO: 35414 - protein, 657 aa, Desulfitobacterium hafniense Y51
MKFFKNAAVYLLIILIAIMLIRFANPPATQPLDMDYTKFYEAVVTGQVEEVVISTDDNVNTYEVKTKDGQQYVVLGEAKDVDLSAQMNEHKVNVRVNPPVTTPWWAGLITTVLPFLLIGGFIFFMMQQSQGGGNRVMQFGKSRAKLVTDEKKKVTFADVAGADEVKEELEEVVEFLKFPKKFNELGAKIPKGVLLFGPPGTGKTLLARAVAGEAGVPFFSISGSDFVEMFVGVGASRVRDLFEQAKKNAPCIVFIDEIDAVGRQRGAGLGGGHDEREQTLNQLLVEMDGFNGNEGIIIIAATNRPDILDPALLRPGRFDRQVVVDVPDVKGREEILKVHVKGKPMHSDVELDVLARRTPGFTGADLANLVNEAALLSARRNEKEIKMNALEDSVERVIAGPEKKARVISDYEKKLVSYHEAGHALVGEMLTHTDPLHKVSIIPRGRAGGYTLLLPKEDRNYMTKSHLLDQVTMLLGGRVAEALVLHEISTGASNDLERATGLVRKMITELGMSEELGPLTFGQKEGQVFLGRDIARDRNYSEAVAYSIDKEARRMIDECYLKAQTIIQENMHKLNAIAETLMEKETIEAKEFAELMARFDQPVETAQVPEPSETENNTTEHDDLLPATEETSVEEEGRTEAEGLSGSTLEEEKNKID

SEQ ID NO: 35415 - protein, 127 aa, Desulfitobacterium hafniense Y51
MFRTMMKSKIHRATVTEANLKYVGSITIDEELLEVADILPNEKVQVVNNNNGARLETYVIPGKRGERTVCLNGAAARLVQVGDEVIIIAYGIFTDEAARTYEPKVIFVDEGNNPVKIAHEEIHGQQS

SEQ ID NO: 35416 - protein, 291 aa, Desulfitobacterium hafniense Y51
MSKETLMKMTESPGVFMGGETPYEEADAVILGIPMDYTVSFRPGTRLGPLSIRNVSIGIEEYSVYLDKDLSDYAYCDCGDLSLPFGNVEKSLQVIEAAARQVVEDGKFPIFLGGEHLVTYPLLKPFIEKYPELRVVHFDAHADLRTDYSGEPNSHATVMRKISEALGPHRVYQFGIRSGTREEFLFAKEHNHLVVEEVLEPLKAVLPELKGKPVYVTLDIDVVDPAFAPGTGTQEAGGCTSREIIKAVHALSELDVVGFDLVEVSPLMDTSERTALLAAKIVREAILSFVK

SEQ ID NO: 35417 - protein, 282 aa, Desulfitobacterium hafniense Y51
MRTMMHKDRLVAPVVKWVGGKRQLLEDLTPLFPKRVMSYCEPFCGGGAVLFKLQPDTAWVNDINSELIRMYEVIRDDVEELIRALGEHPNEEEHYYRVRDWDRDKEKYGNLSKVQKAARVIYLNKTCYNGLFRVNNAGEFNTPFGHYKTPNIVNEHTLRAVSAYFQRAQITFSSTDYAEVLAGVAKGTFVYLDPPYDPVSSTANFTGYAKGGFDRAEQIRLRECCDELDRRGIKFMLSNSATEFIKEQYGAYQITIVKAKRAINSNAAKRGQIDEVVVRNYK

SEQ ID NO: 35418 - protein, 483 aa, Desulfitobacterium hafniense Y51
MPSLRQSKAPVYEALLKYKSMRVVPFDVPGHKQGRGNPELTEFLGEKCLSVDVNSMKPLDNLGHPVSVIKEGEELAAEAFGAHHAFFMVNGTTSAVQAMVMSACKLGEKIIMPRNVHRSAINALIISGAIPVYVNPGVNKELGIPLGMSVADVRKAIKENPDAKAILVNNPTYYGICSDLKTITELAHEHSMLVLVDEAHGTHFYFGENMPISAMAAGADMAAVSMHKTGGSLTQSSFLLIGKRLNVGRVRHMINLTQTTSASYLLLSSLDISRRNLALNGQRIFDKALYLANYGRDEVNKLGGYYAFGKELNNGDSVYDFDCTKLSIHTRDIGLAGIEVYDILRDDYGIQIEFGDIGNILAIISVGDRALALERLVSALAEIKRRYQRDKAGMFDHEYINPVVVMGPQQAFYAQQRSLPIQESKGKVSGEFVMAYPPGIPILAPGEKITEDIIDYIAYSKAKGCFLTGTEDMDIENIKVVEE

SEQ ID NO: 35419 - protein, 226 aa, Desulfitobacterium hafniense Y51
MSCIIPNIYSQPTDTNLWNILLSSGIPRHYQKGEFVFEKDQPSNGLICLKKGKVKVSSFFSEGSEKIFGILVAPALFGETETLDQGPRMVSATALTHVEIVAISGNKTKELIYTYPDIALSIIQSIGVKLRWTTLQAEDLSTQKIEYRLARLLLDFKHYGIFTSKNNDNCLMITHEELAHFIGTARSKVTTYLNEFAHKGLIRLRRGEIRILDTAGLNKYTHKSQA

SEQ ID NO: 35420 - protein, 312 aa, Desulfitobacterium hafniense Y51
MHDLAQEGAKRMANMYLSPKEITEEYVAIGQKKASTPAYKLFILGILAGALIAFASEGSNVAIHTLDSVGLGKLLAGIIFGTGLMMVVITGAELFTGNTLIVISCIEKKVRWLDMLRNWVIVYLGNFIGALTIVIFIIYSGQLDFSGGLLGGFTIKTAVYKTGLTFSQALLMGIMCNWLVCLAVWMAAAAKDIAGKVLAIFFPIMLFITSGFEHSIANMYYIPAGIIAKMNPVWVEQAEALGVTAAKLAHLNWESFIVNNLIPVTLGNIIGGSLFVGVFYWLGTLYKGRPAAAEKTDRLMPGKLDNAWAKSK

SEQ ID NO: 35421 - protein, 392 aa, Desulfitobacterium hafniense Y51
MQDVVIVSAVRTPIASFGGALQGYGAVNLGALVIREAVQRAGIQGKQVDEVIMGNVLQAGLGQNPARQAALKAGLPVETTAQTINVVCGSGLKAVIAAAQAIRAGDAEIVAAGGMESMSDAAFLLEQARWGQRMGHGTLVDSMIKDGLWCAFNEYHMGITAENVAEKYGISRREQDEFAAWSQAKAVAAIAEGRFREEIVPVAIPQRKGEPVIFDRDEYPRAGTTVETLAKLKPAFKKDGTVTAGNASGINDAAAACVLMSKEKAAALGIPYLAVIKGYGMAGVDPAIMGVGPVDAVKKALQKAGISLDELDLIEANEAFAAQALAVTKELGFPGEKVNVNGGAIALGHPIGASGTRILVTLVHEMKKRRDKLGLATLCIGGGQGIALVVGG

SEQ ID NO: 35422 - protein, 301 aa, Desulfitobacterium hafniense Y51
MERRKVRIIGVPIDLGADRRGVDMGPSAIRYAGLHERLKKLGWEVEDVGNIDVPIAETREIKDPLLKYLPEISEVNQKLYPLVAQAIKEEVIPLIIGGDHSLGIGSLAGCAASGKQFGVIWFDTHGDYNSMETTSSGNIHGMPLAVANGIGVKELTSIGGAARKIKEENTVIIGARDFDDEERAMIRQSGITVFTMSDIDRLGMEAVVRQGLEIANRGTHGVHISFDLDVLDPSEAPGVGTPVQGGMTYREAHLAMEMVADCRCLLSMDVVEVNPILDAQNKTAELAVGLISSAFGQKIYP

SEQ ID NO: 35423 - protein, 409 aa, Desulfitobacterium hafniense Y51
MLRKEVIPMKKVVLAYSGGLDTSIIIPWLKENYGYEVIAMAADLGQGEELEPLHEKAIKSGASKLYIEDLQEEFVTDFIYPTLKAGAVYEGKYLLGTSFARPLIAQRLVEIAAKEGAVAIAHGATGKGNDQVRFELAVKALNPDLEIIAPWRIWDIKSREDAIDYAVERGIPVPVTKDRPYSMDRNVWHLSHEGGDLEDPWNEPKKDLYLLGVSPEDAPDEAEYLELDFEQGIPVSLNGEKLGPVQLLETLNEVGGKHGIGIVDMVENRLVGMKSRGVYETPGGTILYTAHQALEHLTLDRLTLHYKEQIALKYAELVYDGVWHSPLREALDAFVDVTQKNVTGTVRLKLYKGNCSLAGVKSPYSLYSEEFATFGRDGVYNQKDAEGFINLFGLPLKVRALMEKKSGLR

SEQ ID NO: 35424 - protein, 230 aa, Desulfitobacterium hafniense Y51
MRILLVDDEKNISNVLKAYLQQEGFQVTTAINGLVALTLFKENPYDLVLLDLMLPGLSGEEICKEIRKISAVPIIMLTAKIELEDRIEGFNMGADDYISKPFSPREVVARVKAVLRRTDIETSPLAEVISYDNGLVIDNSRHEVRFNKEVIPLTPTEFKILGSLAKYPGRVYSRGQLVEIVQGHDFGGDDRVIDAHIKKLRQKLEKVPSDPKIILTVYGVGYKFNPHQEE

SEQ ID NO: 35425 - protein, 631 aa, Desulfitobacterium hafniense Y51
MSAAEKQTGFGPGRQGPGGGRGFFGGPPGGPGGPGGGEKARDFNKTLRTLTGYLTPHKTTISIVVFFALFSTVFTIVGPKLLGKVTTKLAEGLFAWYNQTGLLTDFNYIGKIIGALVVLYVISSICSYVQGYLMSGVAMDVTYRLRKEIAEKMSRVPLNYYDTRSHGEVLSRITNDVDLINQTLNQSLNQIITSAASIVGILIMMLSISWMMTVAALLVIPLSLGIVGVVIKRSQRFFREQQHSLGELNGHIEEMYGGHTIVQAFNGEAESVAFFERVNDQLYHSAWKSQFVTSIMMPVMSFVGNLGYVVVSILGGYLAVKRVVDIGDIQAFIQYMRSFTQPIAQLSSISNTLQSTAAAAERVFEFLAEGEETPETAHPVTLDQFSGHVRFEHVSFGYSKDKQIIHDFSADIKAGQRVAIVGPTGAGKTTIMKLLMRFYEIDSGRILISDHDIYDFSRHDLRSLFGMVLQDTWLYNASIKENIRYGTFAATDEEVMEAAKAAHCDEFIRALPGGYDMVLNEESSNISQGQKQLFTIARAILADPKILILDEATSSVDTRTEILIQKAMENLMRNRTSFVIAHRLSTIRDADMILVLKDGDIVEQGNHEELLAQNGFYADLYQSQFEEAEAV

SEQ ID NO: 35426 - protein, 337 aa, Desulfitobacterium hafniense Y51
MQNRLMKKRLMKKEGWAVAQYTVLSTSPTFTKYSPQAAGILEKKGCRLVMIPPNGLREREDFKAVLAEAHVWVVGINKVYAEDLEAAPNLKLIIKHGTGVDSIDLKAAAARGITVANAPGTNANSVADLAFGFMLSLARQIVSADKRTRDGFWGTVMGKDVYGKTLGVLGLGQIGKGVIRRASGFDMNIFGYDLVHDSQFEKEYRVRAATLEEIMSEADYISVHLPLLESTKNIIDRSLLEKMRPTAFLINTSRGGVVDETALYDLLKEKRIAGAALDVFATEPPRQSPFFELDNVIVAPHMGAYTEGAMGAVSEIVAESIVRVLAGKEPLSVIKTN

SEQ ID NO: 35427 - protein, 371 aa, Desulfitobacterium hafniense Y51
MIIGIPKEIKIYENRVGMPPAGVDALVKAGHTCYLEQSAGLGSGFTDEEYREAGAVILETAQEVYERAEMIVKVKEPLKSEYSLLRENQILFTYLHLAPNQELTEALLEAKVVGIAYETVELSNKSLPLLAPMSEVAGRMAIQVGAHLLEKTNGGRGMLLGGVSGVEPAKVVIIGGGNVGINAVKIAVGLGAQVIVLDISGARLAYLDDIFGGRVVTLMSNNYNIAKAVRRADLVIGAVLIPGARTPKVVTEEMVKTMKPGAVLVDVAIDQGGAIESMDRVTSLDDPYFVKHGVIHYSVGNMPGAVPRTSTMALTNATLPYVLKIASLGAEKAMMEDEALRKGLNVYKGKLTIKTVAEAQGLEHTPSEELF

SEQ ID NO: 35428 - protein, 387 aa, Desulfitobacterium hafniense Y51
MNQYLSPIAANLPPSGIRKFFDLVSTMKNVISLGVGEPDFVTPWTVRESGIFSLEQGQTMYTSNSGLLELRQALSWNMEKKLGLEYNPNDEILITVGASEAVDLAMRALLGPGDALLLTDPAYVSYGPCATLAGAEVHYVPTREEEDFRVRVEDLERVYTPNAKVLVLSYPNNPTGAIMTWEDYQPIAKFVQDHDLIVVADEIYSDLSYGGSHTAFASLPNMRNRTLHISGFSKSYAMTGWRIGYVAGHHDFIQAMTRIHQYTMLCAPITAQLAALEAVRSAEQAMQDMVATYDRRRRLMVHGFRKMGLSCFEPLGAFYTFPSIKATGLTSEEFANELLQEEKVAVVPGTAFGPSGEGHIRCSYAYSTEQIQEALTRMERFVSKRIK

SEQ ID NO: 35429 - protein, 462 aa, Desulfitobacterium hafniense Y51
MSSEKDHHVELHRGLKNRHIQMIALGGAIGTGLFYGSATTIQLVGPAIIVSYLLGGTAIFFIVRALGEMCVDQPVAGAFSYFAYKYLGDFPGFFSGWNYWFNYIAVSMAELTVVGVYINFWYPNVPQWVTALAFLVIITLINLINVEAFGEFEFWFALIKVVAILAMIAFGLVMIFFGLGEQGAVGFSNLWTHGGFLPNGVWGLLLSLVIVMFSFGGVELIGITAAEADDPKRSIPKAINQVVWRILIFYIGALTILMILYPWDQIGTSGSPFVEIFSAIGIPAAAHILNFVVLTAALSVYNSGIYSNGRMLHGLALQGNAPKFLTKVSRNGIPINGVFASSAVTLIAVILNFLVPGKVFLYLISIATIAGIFNWAMILVTQLRFRKVEAEKGREDQLQFKMPLYPISNYIALAFLAMVVVLMAYIPDMVYSLYIGPIWIIILYIGYKFLRRNPETKPPHRE

SEQ ID NO: 35430 - protein, 561 aa, Desulfitobacterium hafniense Y51
MGNEKESTTYATGAALLLDSLVQEGVEVMFGYPGGAVLPIYDALINSPIRHLLPRHEQTAIHAADAFARVSGKVGVCLATSGPGATNLVTGIANAYMDSIPVVILTGQVPTSLLGTDSFQEVDITGITLPITKHSYLVKDPRQIPRIVKEAFYIASTGRPGPVLIDLPKNVLAATDVRPAPAELNLKSYKYFTKGNAGQIEEAARVIAQSQRPVLYAGGGVITAGASEILQQVVERANLPVVTTLMGIGSLPTNHPNVLGMVGMHGTVTANYAVDDCDLLIAIGVRFDDRVTSGLGHRFATKAKIIHIDIDPAEIGKVARTKVPIVGNAKLVLEELLSKVSKPEISPWWEQIRLWQEEKLKTDNPNLNPQVIIETLGEIAGEETIVTTDVGQHQMWAAQGYPVPAPRHFITSGGLGTMGFGLPAALGAQVAAPESTVFLVTGDGSFQMSIQELATAVQYQLPVKIILMNNGVLGMVRQLQMVFCDERYSQIQLTANPDFIKIAEAYGIRGIRVTETSEVRNALLEAINHPGPVLMDFIISEDEVVSPMVPPGKGLTEMLGW

SEQ ID NO: 35431 - protein, 449 aa, Desulfitobacterium hafniense Y51
MVQKLEHTRKNYYKDAEIAAYGERKPDYSTLGRKIENTYARQRQVVCVEACRTPYGKSLGALLEYDAAQLGALAIKEVLRRTKGKVAPGEVDYVIMGHVVQAGSGQVSSRQATLLAGLPEHVPSITVNKVCSSGVKTIDLGAQMIALGRAEIVIAGGQESMSNIPFSLPDMRRGRKMGLPTIDCVDLMVKDGLWDSFYERHMAIHGSEVADEFGYSREEQDEWALHSQLAASAAIAAGKLDAEIFPVAVKTGKETLEKDEGPRANTTLEGLAKLGPVFDHVSAVTGKPGSVTAGNAPGTNDGGDVCLLMSRAKADELGLKPLFSIVDYAEVSQPTKDIATVPGLSIKKVLEQNKLTLDDIKLIEINEAFAAVALVSARTILGMTKEQMYEKVNVNGGAIAYGHPIGATGARIVMTLAYELRRRGGGYGVCGICAGHAQGDAMLIYVDPD

SEQ ID NO: 35432 - protein, 864 aa, Desulfitobacterium hafniense Y51
MSFDTNRFTQKSQEAIIQAQTMAERNGNSQVEPEHLLLALLEQGEGVVPQVLTKLDIPVGALVQKVRQEVNRLPRMMGANVQLTISPRLRTVLVSAHDEMETFKDDYVSTEHLLLATLSQGGGAAEKILKQEGLNREKLLQALREVRGTQRVTSQTPEGTFRALEQYGRNLVEQARRGKLDPVIGRDEEIRRVIQILSRKTKNNPVLIGEPGVGKTAIVEGLAQRIVRGDVPESVKDKKIIALDMGSLIAGAKYRGEFEERLKAVLKEVQEREDIILFIDELHTVVGAGAAEGAMDAGNMLKPMLARGELHMVGATTLDEYRKYIEKDAALERRFQPVTVGAPSVEDTISILRGLKERYETHHGVRITDGAIIAAAVLSDRYISDRFLPDKAIDLIDEAAARMRMEITSDPYELDQIKRRILQLEIEREALKKEKDEGSKERLEKIEEDLANLKEERSALEAQLQGEREVLARINSLKEDIDQNRLKMEQAQQAFDYNKAAELQYGILPKLEKELNALEEQLRNRKNTLLKQEVGEEDIAEVVAKWTQVPVAKLLESEMEKLVHMEARIHQRVIGQEEAVKAVADAVRRSRAGLQDPNRPLGSFLFLGPTGVGKTELAKALAEFLFDDDQGIVRIDMSEYMEKHTVSRLIGAPPGYVGYEEGGQLTEAVRRKPYSVVLFDEVEKAHGDVFNVLLQLLDDGRLTDGQGRVVNFKNTVVILTSNIASPLIQELTASGAAQEVLRSRVTEELRLHFRPEFLNRLDEIIVFHPLGQEHIGSIVQIQINKLRDYLAPRKMTLELSQAALNKIIQQGYDPIYGARPLKRVIQQNLQNPLAMKILQGALYEGDHVLVDLDPQGQLLFKKSE

SEQ ID NO: 35433 - protein, 334 aa, Desulfitobacterium hafniense Y51
MKRGIILKPRVFITRKIPEDILTLIEEVCEVKVWPEEDTPIPRSVLEQEIREVDGLYCLLTETIDASLLDLGKNLKVVSNMAVGYNNIDIEAATQRNILVTNTPGVLTETTADLTFALLMMTARRMEESSQYLRQGHWKTWSPMLLAGQDIFGATLGIVGMGRIGEALVKRAKGFDMKIIYYNRTPKPELEESLGIEYRLLDELLQEADFVCILTPYTPETRNLIGKRELELMKPTSILINTARGGIVNEEDLYEALAQQQIYAAGLDVFDQEPLPTDHPLLTLTNCVALPHIGSATIKTRREMARLAAQNLLTYLQGQRPPHCVNPSVLTPKL

SEQ ID NO: 35434 - protein, 392 aa, Desulfitobacterium hafniense Y51
MREVVIVSAVRTPLGSFGGALENFTGAELGAIVIKEAIKRAGILPAQVEEVIMGNVLSAAAGQNPARQAAIKAGIPQEVPAWTLNKVCGSGLKSVICGAQAILAGDADIIVAGGMECMSSSAYALPKARKGYRMGNDSLVDTMIMDGLTDAFHNIHMGLTAENIAEQFQISREDQDALALRSQNRAEAAIQSGLFDEEIVAVEIPQKRGEPLVFSQDEFPRFGTTADTLTKLRPAFKKEGTVTAGNASGINDGAAAVVVMSKEKAEELGLAVLAKITSWASAGVDPLIMGTGPIPATRKALAKAGLTIADIDLVEANEAFAAQAAIVTRELGLDVEKTNVNGGAIALGHPIGASGTRVLVTLLHELKRRDGQRGLATLCIGGGQGVSLIVER

SEQ ID NO: 35435 - protein, 601 aa, Desulfitobacterium hafniense Y51
MNTAVLKLEKHLPLIDTLRTYKKEYIKKDITAALTVAVIAVPQSMAYALIAGVNPVYGLYTAIVSTIFCSLFSSSNHLIGGPTNAIALLVASGMKNYMALENAYEILFLLTFLVGAMQLLFGVLRLGKLINFVSHSVIVGFTAGAAVLIGLGQLNSFLGISIPNSSEMSTLNKLVYIATHLGTVNYYALGLGLLSIFVIMICKRINKNLPGALLGVCLSSALVAMFSLEQFGVKLTGTIPSQLPPFKMIHFDLGMAGELLSGAFAIAIIALVEAISISKAIASQSRQKIDANQEIIGQGITNVVAPFFQCFPGTGSFSRSAINFQSGAATRIAGILSGVFVAIVLLFLGSYAKYIPMASLAGVILNIAYNMVNRAEIKRIFKLNKADALVMGTTAIAAVLLPHLDTAVYLGIAVSIMIYLREGSKVHIKILTPAQGKENAFLEKEIQSVEEKADTLIVHIQGNLYFGCADELEKKLDLLVGKAGIVIIRMKRVNSIDVTSLDTLKLFVQKIKETGGKVIISGVSSNVDKLLTESKLAQQIGEENIFISQEDLFASSNQALNRAKYFLDYDISKVKEMFSNSTLVFNDQFDSSRQAVSQNTN

SEQ ID NO: 35436 - protein, 212 aa, Desulfitobacterium hafniense Y51
MSKEEESCILQFGTIMRYHRGQVIFSESDTADRIYYIKEGYVRIFRVTPYGKKVTVGSIRSPGQLMGLAETLYRGDRTCFASAINEVTLVVVRNPQFMDLLVKYPAIAIKASITLAIRMREAEQIIEEIACFQVSGRLAMFLVKMAKRMGVETPRGTKINFRLTHEEIAYMIGTTRQNVTSLLNVFKEENSIAIEDKELYILDFDKLNNWIV

SEQ ID NO: 35437 - protein, 250 aa, Desulfitobacterium hafniense Y51
MVIMSGYSKEYEIFYFQVDQFGEASVITILDFLEDCAIAHSEAVGLGIESLLEQRTCWVLNRWRLEMERYPRLGEKVTIETLNTGFERFYGERVFTIRDSQGNIIGKAGSLWIYLNIDKRRPTRIPLQFADQYGVPERYEGKEPFEDLPEITDIHSEIRFHVRRSDIDTNGHVNNTRYVEWMLEGISEESLKDYRLHRLEVIYKKETPYGTDILSQGQGAKDAGLQYLHRVLDQSGERELACGRTVWTKR

SEQ ID NO: 35438 - protein, 303 aa, Desulfitobacterium hafniense Y51
MFARILSEVLTPSQKIAVAAAHDKPVLEAVFKAKELGVALPILVGDEGKIRRYAEEMGIDLADSPLVHEPNVRKAALYASNLVREGQADLLMKGMLQTAEILRAVLDKEKGLREGSTLSHIAIIEVPSLNRLLLITDAGMNIAPDIKQKADIIRNAVTVARALGVEQPKVAALSALEVVNPDMPSTLDAAVLTQMNRRGQIKDCLVDGPFALDNAVNAERAEHKGIRGSEVAGQADILLVPNIETGNAIYKAATCLASFRSAGLVFGAKAPIILPSRADTPESKFLSILCASRVAAFKAGSNE

SEQ ID NO: 35439 - protein, 367 aa, Desulfitobacterium hafniense Y51
MTEPAVRILVINPGSTSTKIGIYENLTCAFNKTVRYHHAELEGYASIMEQKELRRAFVLSSVQESGIPMTSLQAVVGRCGMVKPLESGTYLLDEHLVHDLTSEESMRHASSLGGVIAYEIGRQLSIPAYVVDPVTIDEMIPQARLTGIKAIARRSIFHALNSKYVAKRFCRENQKRYEESRLIVVHLGGGISVSAHRNGRTIDVNDASAGDGPFGSERAGGLPVSAVIELCFSGLYTKETIFTQIMSKGGMQMLLGTNDLREAEKRIDQGDDYAQLVVEAMAYQVSKQIGAMAAALEGEVEGIILTGGLAFSRRFVQLIEQRVRKMAPVTVYPGEDELRAMAEGAFAVLTGREQVKHYGVREIENVR

SEQ ID NO: 35440 - protein, 393 aa, Desulfitobacterium hafniense Y51
MQDVVIVSGARTPIGDFNGALKDFKAVDLGMIALKGALQKSNLEPAQIEEVIAGHVYQAGCKGNPARQVAMGVGCPVETVAATINQQCPSSMRATEMVSQEIMLGKIQIGAAVGIESMTNVPYLLLKAREGYRMGSDTLHDGLLYDALIDAFYNYHMGITAENLAEMYGISRKEQDEHALESHRRACRALKEGKLKEEIVPVEIVTKKETRLIAEDEHPREDVTLESFAKLRPAFQKEGTVTAGNASSLNDGAVALLLMSGEKAQELGVKPLARIVATASASVDPKIMGFGVVPAVRRALNFARMDTKDIDLWEINEAFAAQFLACNRELKLDLDKVNVNGSGISLGHPVGMTGARLILTLIQEMKRRRNQYGCASLCAGGGPAMAVVVEAFS

SEQ ID NO: 35441 - protein, 400 aa, Desulfitobacterium hafniense Y51
MRRVYLDHSATTPVDPEVAKLMMTYYTEKYGNPSSVHSFGRDAKAALENARESVAKLLGAQPTEITFTSGGTEADNLAIFGVTEAQSKKGKHIITSAVEHHGVLEACEFLEKNGYELTIVPVDEEGLVAVEDVAKAIRPDTILITIMHANNEVGTIQPIAEIGKLARDKGIVFHVDAVQSFGKIPIDVVAMNVDLMTVSSHKIYGPKGVGALYIRKGIRIIPRIYGGGQEKKRRSGTENTPGIIGFGKACELAAQRMEEEAVREAKLRDKLLRGIVEKIDYVKLNGPQGGEKRLPGNLNVSIQFIEGEALLLSLDMMGIAASSGSACTSGSLDPSHVLLAMGLSHEIAHGSLRFSFGAQNTEEDVDYVLEQLPKIVERLRMMSPLYDQAKHSQCSRAKAQ

SEQ ID NO: 35442 - protein, 409 aa, Desulfitobacterium hafniense Y51
MRVLVQKFGGTSVSSAERRAQVAAKVSEAVREGYSPVVVVSAIGRSGDPYATDTFINLVNGITLESPKREMDLLMSCGEIISGVVLTSTLKSMGLEAILLTGGQAGIITNDCYGDARIIRVEPKGILDHLSEGRVVVVTGFQGVTEDGQVTTLGRGGSDTTASALGVALNAEAIDIYTDVEGIMTADPRIVEDARILDVVTYNEICHLAHQGAKVIHPRAVEIAMQRNIPIWIKCTFSDARGTLVTSIQPDMGAGTDITGDRTITGIAHTPNVTQIQVPTHDVADVLQVDKQIFKGMALADISVDFISVQPESVLYTVPDEIAEKAMKILDNLGFKPTAVPGCAKVSIVGAGIAGVPGVMANMVEALSDAGVRILQSADSHTTIWVLVNKEDMVPAVQALHKKFLLGAC

SEQ ID NO: 35443 - protein, 399 aa, Desulfitobacterium hafniense Y51
MKILVINCGSSSLKYQLLDMDTQTPIAKGLVERIGLPGAVLTHRPADGEKEIITAEIPNHTIAIQLVLDALVNPEYGVVKSLEEIGSVGHRVVHGGEKFASSVLITDEVMQAIEECIELAPLHNPPNIAGIEACQKLMPGVPQVAVFDTAFHQTMPPHAYLYGLPYEFYEKYKIRKYGFHGTSHKYVSQRAAKLLNRPAEGLKLISCHLGNGSSITAIKDGKSIETSMGFTPLEGLMMGTRSGDLDPAIVSFIQQKENLSSDEVNDFLNKKCGVLGLSGVSSDFRDIEQARDQGNYRAALALDVFSHDVKKYIGSYAAVLNGADAIIFTAGLGENSAEMREAVVDGLQYLGAKLDLEKNKVRGKEADISAPEATCRVLVIPTNEELMIALDTLDIIQKG

SEQ ID NO: 35444 - protein, 290 aa, Desulfitobacterium hafniense Y51
MAEVDYKALKKGGFMQQVQKDHFALRLRVAGGQIQADQLQKVTELARTYGQGYIHMTSRQGIEIPFIRLEDVEAVLNELKEVGLEPGACGPRVRTITACQGAVICPSGLIDTTRLAGELDKRYFARELPHKFKLGVTGCGNNCLKAEENDLGIKGGVRPSWQQDQCIYCGLCQAVCPAKAIEVHRQEETLSLDSQLCTYCGKCVKSCPTSAWEGERGFLLSFGGLFGNRIAIGKGILPLVITEAHLYQVINKTLEFFQNHGKPSERFRNTLDRVGWETLAKELEGLDLER

SEQ ID NO: 35445 - protein, 303 aa, Desulfitobacterium hafniense Y51
MHGSEPNRDFRSGFVTVVGRPNAGKSTLLNQLLGQKILIMSDKPQTTRNKIHCILTEERGQIVFLDTPGIHKPKHKLGEFMVDSALESLREVDLILYMVDTTAEFGAGEEYILENLKHVKTPCILLLNKIDLIEKDKLLKLIKDYSALKDFLAILPISAKTGENKDELLKLIFKEMPQGPMYYPEDEVTDQPERFIMAELVREKVLQLTRDEVPHSIAVVVESVEEKKTLIKVRALIVVERDSQKGIIIGHGGSLLKEIGRLARQDIETLLGSKVFLELFVKVEKDWRNRGRSLREFGYSDRS

SEQ ID NO: 35446 - protein, 616 aa, Desulfitobacterium hafniense Y51
MNMGKVIGIDLGTTNSCVAVMEGGEAVVITNAEGNRTTPSVVGFSKTGERLAGQVAKRQAVSNPDKTVISIKRHMGTDYKVKIDDKSYSPQEISAMILQKLKADAEAYLGQTVTEAVITVPAYFTDAQRQATKDAGTIAGLDVKRIINEPTAAALAYGLDKQEDQTVLVFDLGGGTFDVSLLELSQGMVEVKATSGNNKLGGDDFDQRLIDYMVAEFKKDQGVDLAKDRVALQRLKEAAEKAKVELSGVSTTNVNLPFITMTGEGPAHLDMNITRAKFEELTADLVEATLGPTRQALADAKLSWNEVNQVILVGGSTRIPAVQEAIKKLSGKEPHKGVNPDEVVALGAAIQGGVLAGEVKDIILVDVTPLSLGIETLGGVFTRIIDRNTTVPTTKSQVFSTAADSQTSVDIHVLQGEREMAAYNKTLGRFQLSGIPPAPRGIPQIEVKFDIDANGIVHVSAKDMATGNEQKVTITASTGLSQEEIEKMKKDAEAHADEDKKRKELIDAKNQADSMVYQTEKTLKDFEGKIPDNEAEPIKKALEELKTAAAGENIELIKEKTEGVTKVLYPIIEKMYQQTGGAAPGPDMGADPGAGGAQGDDNVVDAEYTEVDKDQK

SEQ ID NO: 35447 - protein, 241 aa, Desulfitobacterium hafniense Y51
MIKVLIIEDDPMVAELNRYYLEQIGGFQLVASAGTAADALKVLKKKKVDLILLDIFMPGINGLEFLTQLRKSEIESDVIIVSASTDSQSIRKALQHGAVDYLIKPFEYERFRDALNVYKKRELLMKNKQTLSQKDLDKQIFNMEEEETVDKKSDLPKGISGDTLKLVWDHILATQGTAFTTEEMALRVGISRVSMSKYIGFLREQEVVNTEISYGAVGRPVNYHRLNQLKVKGFKKYLKEI

SEQ ID NO: 35448 - protein, 513 aa, Desulfitobacterium hafniense Y51
MNWALLGNIDPYVFIISALLAVGFLLWGVVDSEGLSHVSNTILDYIIQQWGWLFIVGILFFLLFCLYLAFSRYGDIKLGGQDTLPEYSTFSWFAMLFGCGMGVGLVFWSIAEPINHFLNPPAYVNALSPSQSAEWSLAISFFHWGLSAWASFVLIGLAMGVIIFRNKMPMLLSSCFYPLLGDRIYGPIGKLIDIITLWASLFGMTTTIGLGTKQLAAGVTYNYGIPQGIPLLLGILAIVIICYLISACTPNLKGIKIGSDLSLIATGGLLLFVFLFGPTKFIMDMFVNSTGVYIQNFFAMSLWTDPIEQSGWLGSWTIFYWAWWIAWAPFVGMFIAKISKGRTIKEFVLGALIAPTLLDMIFFGIFGGTSLSFELNQVSQGILANAINVDISSAVFVLFEQFPFREITSLILIFVIFTFFVVSADSCTIVLGMLSSGGNENPRIPLKLFWGIAMGAAAGLLLMLGDGGLDALQMASILGGFPFLFIMFAICYSIIKTLRREKSTNLVGIRERN

SEQ ID NO: 35449 - protein, 496 aa, Desulfitobacterium hafniense Y51
MNMGVDKKQNTVLYISSAIALLFVLWGVFLPENMANVVNKVFALLTTNFGWLYLLAVAIFIIFVFGIAISRYGKIKLGADDDKPEFSNFQWFAMLFGGGMGIGLVFWSVAEPIMHFNSPPFGEPGTVEAMQTSMRVVFFHWGIHAWVNFAIAGLALAYFQFRKGLPFLISSAFYPLIGDRIYGPIGKAIDILAVFATIFGIATSLGLGSSQIATGIQYIWGIPAGPLTISLVIAVITVIFTLATVSGLHKAMQSIANVKVWLSVAFMVFIFYFGGKVFILNTFTQSLGDYLQNFVGQTFWMANESWVGGWTIFYWAWWIAWAPFVGQFVARVSKGRTIREFVFAVTLLPVGFSFIWLAIYGGAAFNLDQISGGFIQNAVNADYTTALFALLQQMPLYAITGPLAILLIVTCFVGAADSATYVLAMLTSNGDMDPSKKLRSFWGIMQGAMTIVLIVVGGTAALKALQTASIASAFPFMLIMLVMCYSILKALRSDHP

SEQ ID NO: 35450 - protein, 424 aa, Desulfitobacterium hafniense Y51
MFYDQAKIYVKGGDGGAGAVAFRREKYVPEGGPSGGDGGRGGKVIFIADEGLRTLVDFRYKRHYKADRGEHGQGKNMHGKSGEDMSVRIPVGTVVKDADTGEILADLIEHGQKVVVANGGRGGRGNARFMSNTNKAPTVAENGEPGEERNLLLELKLLADVGLVGFPNVGKSTIISRISAAKPKIADYHFTTLVPNLGVVELEDGESFVVADIPGLIEGAHTGAGLGHEFLRHTERTRLIFHVLDIAGSEERDPLEDFQIIAEELRQYSQELANRPILIVANKMDIPGAEENLQRLTEKLGEDYRIFPVSAATGEGLKELVYAAAKALPEIPAPQIFVRDEEQHKLTQASAPHRFELTREGDFFVVSGKEIEKHVQMTMFDREDGLYRFQNILKAMGIERALLDEGIKVGDKVRIAGIEFEWEE

SEQ ID NO: 35451 - protein, 103 aa, Desulfitobacterium hafniense Y51
MYAVIETGGKQFRVEEGKVLFVEKLDANVGDTVTIDKVLLVEKDGAVKVGTPVVDGAKALLKVVEHGKGEKIIVFKMKSKKNYRRKQGHRQPYTKVVVEAIQA

SEQ ID NO: 35452 - protein, 392 aa, Desulfitobacterium hafniense Y51
MREVVIMSAVRTPIGTFGGKLSELASVELGAIVIKEAVMRAGIRLEHVDEVIMGNVLSAAMGQNPARQAAVKAGLPVEVPAWTVNKVCGSGLKAVVCGAQAILTGDADVIVAGGMESMSTSPYALPKARAGYRMGNGTLVDTMIVDGLTDAFHNVHMGLTAENVSEKYGITREQQDRFALQSQNRAEAAIKSGKFDDEIVRVEIPQKKGEPLIFERDEFPRFGTTSDSLAKLRPAFKQDGTVTAGNASGINDGAAAVVIMSKEKADELGVPILAKITSWASIGVDPLIMGTGPILASSKAMAKAGLTIEDIDLVEANEAFAAQALAVKEDLKLGGELTNVNGGAIALGHPIGASGTRILVTLLHEMKKRKVRRGLATLCIGGGQGIAMIVER

SEQ ID NO: 35453 - protein, 384 aa, Desulfitobacterium hafniense Y51
MKEAFIIEAKRTAIGKAGRGSLAHMRPDDLAAFVIQDVLKSAPNLNSADIDDCVIGCSFPEGEQGMNMARVIALRAGLPIDVSGLTINRFCSSGLQAISLAADRIRLGEAHAMLAGGAESMSAVPMGGGKPAPNPYMMEHCPEVYLSMGLTAENVAKKYEITREQQDEFAAASHQKAHAAQVGGRFEEEIVPVLIASGKKGEVWFSKDEGIRADSTVESLGKLKPAFKNGGCVTAGNSSQTSDGAAATLLMSEEKVKELDLKPLALWRGFAVAGVEAELMGIGPIKAIPKVLKQVGLTLEQIDLFELNEAFASQSLAIIKTLGIDPAKVNPNGGAIAFGHPLGCTGAKLTATLLHEMKRRGLKYGMVTMCIGGGMGAAGVYELL

SEQ ID NO: 35454 - protein, 330 aa, Desulfitobacterium hafniense Y51
MKDGSKPKVLIARQVPQEVEEWIGRHCEYSKWEGSGDIPRSELLKQLGDVDGLLINREKIDGELLDAAPKLKIVANISVGYNNFDIGEMQARKVLGTHTPNVLDDTVADLVFGLMLSTARRLCELDRYVKAGRWNETVTPDLFGMDVHHQTLGIIGMGRIGRALAQRGKWGFDMNILYHNRSRHPEAEQRFDARYCTLEELLQRSDFVVLLAPLSPQTVNLMSGREFGLMKRSAVFISASRGETVDEEALVEALREGRILGAGLDVYRKEPIPPDHPLLRFKNVVTLPHLGSATTRTRLAMARMAAENLLIGLKREIPPQCVPELKHLVL

SEQ ID NO: 35455 - protein, 240 aa, Desulfitobacterium hafniense Y51
MFDNNDSPWIKGDQKRFENILKFHGICKTKVYSASETIYIQDDPGDTFFYVKSGRVKVYILKGDGSEKTLSIHEQGGFFGETSAIDLFPRPCCASAMISSEIIALTQEELKKLLKFDADLYFIILQSLTRKIRMLSFQIQEMAFLEAEQRIIHMLLRLTADFGTTTQDGISLSIKFSDQELAGLVGACRTTVTKTLNSLKKQGFIDKQYRNIIIKNQIGLLEYLYGHKANEKALNLSDCI

SEQ ID NO: 35456 - protein, 514 aa, Desulfitobacterium hafniense Y51
MEYSMEGFMKSASKVDKTIIWSSLLVSSAFIIATLVTPSGVSQILNAIFSFFTKNMGWAYMLSAAAFVAFGIGLAVSKYGQIKLGKDDEEPEYSRGSWFAMLFATGMGVGLVFWGAAEPIMHFDTSPFAANRTPEAASIAMRTVFFHWGLHPWALYGVVAMSLAYFQFRKGLPGLISSTFYPLIGEKGIRGPVGKIIDVIAVVVTLFGVATSLGLGTQQLTTGMNYVYGLPNTTSMALVIIAIITILFTIAAASGIDKGIKFVSNTNMVLAFLLMLFLLIVGPTKYILNTFFESMGNYLQNFVSLSFFLDTQGAVAERTGYDWIGSWSVFYWAWWITWAPFVGSFIARISRGRTIREFVLGILVAPPLLSAIWFSIVGGSALHIELFGSGGISAAVAEDVSSGIFAMLSHFPLSGPMALLTMILLAIFFITSAESATFVVGMFTSGGDLNPDARLKIVWGVVEGAIAAMLLVAGGLSAVQTVAFIFSFPFMIIMILMVVSMVKALSEGEKKPLQ

SEQ ID NO: 35457 - protein, 151 aa, Desulfitobacterium hafniense Y51
MFDLVPFEGRNSGLPRKSRNLFDIDSIFENFFNDTLFPAFYSQSGQMRVDIRENEKEFIVEAELPGVNKEDIQIDCTEDRLTITVQKTESTEEQKDNYIRKERKASSMARSFAIANIRHEEITAKYENGLLTVTLPKHEKTGPKGKKIDIQ

SEQ ID NO: 35458 - protein, 342 aa, Desulfitobacterium hafniense Y51
MKENTVNIGLLGCGNVGQGVIKGILLHSNKILRKLGATLVVSKALVQDISKERAIEGVVLTQKPQDILDDPEIEVVVEVMGGEHPTYSFIKEALAKGKHVVTANKLLLALHGAELQEIAQRKGICLLYEGSVLGGIPILRTIQYGLAGDQVKKICGILNGTTNYILTQMAESGKGYEEALREAQEAGYAESDPTMDVTGLDAACKLVILCRECFELNIPLEEVEINGIQGLTPEEVAEQKEQGRVPKLVAEAAIIEHSSSEPEKRREGIMAKVGVQWLSGEAILSHVSGVDNGLSLETQLVGDLFWKGPGAGGLATGGAVLSDIVEIAKKVVVERRIGNAAR

SEQ ID NO: 35459 - protein, 230 aa, Desulfitobacterium hafniense Y51
MRILLVDDEKNISNVLKAYLQQEGFHVTTAVNGLVALTLFKENSYDLVLLDLMLPGLSGEEICREIRKISATPVIMLTAKVELEDRLQGLNLGADDYIGKPFSPREVVARIKAVLRRTHIETSLLADSITYDNGLTIDNAQHEVRLQEEVISLTPTEFKILGALAKYPGRVYSRGQLVQIVQGHDFGGDERVIDAHIKKLRQKLERVPSDPKIILTVYGVGYKFNAHKEE

SEQ ID NO: 35460 - protein, 338 aa, Desulfitobacterium hafniense Y51
MKQNVDSNRKKVFITGRIPSLAYEILSKEFDVTMHDDLRLLSKEEIIAGLKGKDALLCLLSDAIDKDIIEANPQLKVIANYGAGYNNIDIAAAGEANIPVTNTPDVSTDATADLTFGLILAIARRIVEGDKETRAGRFKGWAPLYHLGVDVTGKTLGIIGMGNIGKAIARRAKGFDMKIVYTSRTRLSEQQEKELGFTYMSLEGVLKTADFVSLSLSYSPATHHMIGERELETMKPSAYLINTARGPLVDEKALLKALENKSIAGAALDVYEFEPQITAGLEKLDQVILTPHIGNATVETRDAMAEIAAGNIAAVLRGEAPLTCVNQNYLKKRNMAAK

SEQ ID NO: 35461 - protein, 452 aa, Desulfitobacterium hafniense Y51
MSNQENGMHRGLKNRHIQMIALGGAIGTGLFYGSAATIELAGPAITFSYLIGGLVIFFIMRMLGEMAVDEPVSGSFSHFAYKYWGEFPGFLSGWNYWFNYIVVSMAELTAVGIYINFWFPDIPHWLTALVCLVLVTLLNLISVGTFGEFEFWFAIVKVVAIIGMIVFGLFLIFSGINGEATGFDNLWIHGGFIPNGMIGILFSLVPVMFSFGGIELIGITAGEADNPQKSIPKAINQVMWRILIFYVGALSVLMVLYPWNQVGADGSPFVMIFSKIGIPAAATLLNIVVLTAALSVYNSGVYSNGRMLYSLAMQGNAPKLFAKLNKRGIPVAGVLVSSGITLVGVILNFLLPGKIFTYLMAVAIIAAVITWTTIIIVNLKFRKAKIAQGEGDALHFKTPLHPYTNYFCAAFLVMIVILMAFTESMKMAVLVLPIWLLILWISFKIKKSRESK

SEQ ID NO: 35462 - protein, 234 aa, Desulfitobacterium hafniense Y51
MKRTYKVLLVDDEESIYRVVEQVLKREAYELLYADNGEGALESFQKESPDLVILDVMLPLIDGYEVCRTIRETSKVPILMLSAKGEIIDKSVGFNLGADDYLVKPFSPVELGLRVKALLRRSFDKEQSAPKARKTTKISKGELEINCESHEVFVRGKPVYLTPKEFELLTFMAEHPDQVFTREQLFAHMWGDEYVNDTSTITVFIRKLREKIERDPAKPQYIQTVWGIGYKFSQ

SEQ ID NO: 35463 - protein, 591 aa, Desulfitobacterium hafniense Y51
MALWGNETNDTRLTESLAAGRVRMTGAQFLAAFLAKKGVSQIYGIPGAAILPFYDAVRELNIESYNVRHEQAAIFMADGYSRATGGVGVCAATSGPGATNFLTGLYSAYSDSVPLLALTGQVPTSLIGKDSFQEAPMVEMARPVTKAAYLVEKTEDLPRILKEGWELATTGKKGPILLDLPLDVQKGLVEVDWSEFDFSQPQPPKQEIAQDTLNTILSMLYEAKTPTLLAGGGIVQGNAAELLRETAELLQIPVVSSLMGKDAFPNDHPLYGGLVGTMCQTPLGNKTILESDLIINLGGRFDGRGTGDSQQFQSGRKVIHVNLDNKELSRHIPTELNLAADIRDFLEHFLAFLRDKGFTPTPQARQRILDLQEERIRLARRTKFDTLPLKPQQAIAEVREAMARDGILTLDCGISQIWATQLFEAYVPRSFLITGRAGTMGWGLGAALGAKLAYPNRQVVNLLGDASLGMSLQELATAAKHNIPVVVVVLNNSLFGLIRQQQNLLFEQRCISTDLEYENHVQGHSRGLDFVATARGIGVEAELIDGPDQLQGALARAFSQNRPYLIEVLVDPLAQCSVSLDGTLTGVLELE

SEQ ID NO: 35464 - protein, 239 aa, Desulfitobacterium hafniense Y51
MKSCTACHSCGCHSEGQFCAAKAPIFAMLADEQLAMISGLITRRRYKKGQVLFFEGDVSDKFYIINHGKIKTFKHTREGKEQILYILSEGDFIGDLSLLKKSAFPYNAEALEDVGVCTLSKDDLDRILKENPEICLKVLESVHDRLVNLENLVQTLSTKDVEARIAGLLFNFSKNFGEHKDGKVLLNIALTREEMANFIGVTRETMSRKLSGMQDEGILELVGNKRIIINRLQDLEAMM

SEQ ID NO: 35465 - protein, 278 aa, Desulfitobacterium hafniense Y51
MKKLGILLASVFLVGSLLAGCGSSTAQQPAQPPAQSGGGSESGAPADVQAIKDRGALSVGVKVDVPGFGYKDPKTNVIDGFEIDLVKALAEEIFGDPSKIKLQAVTAKTRGPLLDSGDVDMVVATFTITEDRKKSYNFSDPYYIDGVGLLVKKAPGYKSLKDLDGKNIGVAQSATSKTAVQAEADKLGVKVKFQEFATYPEIKAALDSGRVDAFSVDRSILLGYIDDSTMLLDDKFSPQEYGVASKLGNDGLAKLVNDKIAEMKGNGELDKLIEKWGL

SEQ ID NO: 35466 - protein, 617 aa, Desulfitobacterium hafniense Y51
MCSILGLVNFKRKISPQEIQCLSTMGKTLIHRGPDQNGLEYGEHFAFQHNRLAIIDIEKGRQPMTATHQGYDYTIVYNGELYNTADLRQELLEHGVKFKTYCDTEVVLYAYIIWGEQCSSKLNGIYAFVIYDSKEKKTYLSRDRFGVKPFFYTFVEGALLFASEIKALLKHPQVKPRLDYQGLWQLLYMMPVKEEGTAIFKDIFELPTASHAFYSLAPGASEAELKIAKYWTMEAYENQDSEAAIVATTRDLLVDAIERQLVSDVPLCTFLSGGLDSSIITAVAAQKYQAEGRQLATYSFEHEGNKDHFKQTLFQPQSDDEFAVYLAQHLHTQHQILTAKKEHLVDYLDEAVRYRDYPGMADIDSSLLFYCRQVKEHHTVALSGECSDEVFGGYPWFYRPEMLTRGFFPWIHEPHARISLFKPELVRPQEGFAYTSEIYRRSVEACPLLPDESETMQNSRIASWLSINYFMTSLLERKDRMSMASGLEVRVPFSDHRLVQYVYNVPWEIKFKDGVEKALLRAAMQDYLPPKILYRKKSPFPKTHDPHYEELVFHLFRKRLDSGSGMLAELLQKDVLNRLISPGNNTWFGQLMGLPQLLAWLVQLDYWFEAYQVQLVG

SEQ ID NO: 35467 - protein, 140 aa, Desulfitobacterium hafniense Y51
MTKILVPVDGSPNSDKAIHYALTLARCKDDLLIFLNVQPNYNTPNIKRFATQEQIKVMQEETSKEVLDHSLEIAKDSIAPIRTLLRTGDPGREICKEAQESAVDSIVMGYRGLGAVKRAILGSVATHVLHETSCPVTIVP

SEQ ID NO: 35468 - protein, 227 aa, Desulfitobacterium hafniense Y51
MKILVVDDDERIREIVRLYLEAEGYDIEEADNGNSALEKVRKDSFDLVILDLMMPGLDGWTVCKVLRKETKIPIIMLTAKGEENDRVLGFDLGADDYVVKPFSPRELSARVKAVLRRLEGEPTKEHLITYPGFTINQITREVVVDETVVKLTAKEFDLLLVLAKNPSRIFTRDQLLNTVWEYDYCGDSRTVDTHINRLRSKLESQVGLSDFIQTVRGVGYKFEWSGH

SEQ ID NO: 35469 - protein, 276 aa, Desulfitobacterium hafniense Y51
MGCGQTGGDQANNANNANKANSASSAGSLEEIKQRGTLRIGVFSDKPPFGYVDANGQNQGFDVEIARRFAKDLLGDESKVEFVLVEAANRVPYLESNKVDIIMANFTVTEERKQKVDFANPYMKVALGIVSPDGALITSIDQLQGKKVIVNKGTTAQDYLTKNHPDLELLKYDQNTEAFEALKDGRGAALAHDNTEVLAWAKSNPGFTVGVPALGSTDTIAPAVKKGDTELLNWINQELAELAKENFVRKAYEKTLLPVYGDDVKPEELIVEGGKL

SEQ ID NO: 35470 - protein, 381 aa, Desulfitobacterium hafniense Y51
MGTALNALIERGAALMCWADPFFPDPVIPEHVKKATLEAIDVGMGSHYTMPIGNGELKKEIAKKLKEYNKMEVDPDRNIIITPGSDSGLLFAMMPFICPGDEVMVHEPSYPSNFLNPKLLGGVTIPVPLRAENNYQIDIEEFEKRLTPRTKMVLLTNPNNPTTTVFRRECLEKLAKFVVDNDLILVVDQAFEDSVFDDIEFVSAATLPGMWERTVSVFSISKGMSLSGYRVGYVVADDKIMDVMYGCAVNILGATNTASQMGAIAAISDRSFVKEYNKIFDKRRKVAYEVFNSIPGVSMAMPESSFLSWVNISKLGTSAEISKYIIEHANVVVNEGTPYGASGEGYLRVVHGCYKDDNVLYDALARIKKALTKLAEEKGVQ

SEQ ID NO: 35471 - protein, 65 aa, Desulfitobacterium hafniense Y51
MLGKVKWFSKQKGYGFIEGDHGQDIFVHFSSIMGDGFRTLEEGQGVEFDIVQGPRGDQASNVQAR

SEQ ID NO: 35472 - protein, 213 aa, Desulfitobacterium hafniense Y51
MEFLLDSANPEEIRQAWAMGVIGGITTNPSLVAKEGRDFHQLLQELVQIVNGPISAEVIALDTEGMLGEARELAAMHPNIVVKIPMTEEGLKAVKVLKAEGIKTNVTLVFSAVQALLAARAGATYVSPFLGRLDDIGENGLLLLADICEVFGVHGLETKVIAASIRNPVHVTEAAKIGADYATVPFNVLCQLFKHPLTEAGIKKFLADWQKLK

SEQ ID NO: 35473 - protein, 543 aa, Desulfitobacterium hafniense Y51
MVFVDNENKSSNFLRSIILEDLREGKVEEITTRFPPEPNGYLHIGHAKSICLNFGLADEFKGKTNLRFDDTNPVKEDTEYVESIKEDVKWLGFDWDNLFFASDYFAEMHKRAVLLIEKGKAYVCDLSAEEIRKSRGTLTEAGKESPYRNRSVAENLELFERMRQGEFKDGEKVLRAKIDMGSPNINMRDPVLYRIAHATHHNTGDTWCIYPMYDYAHPLEDAIEGITHSICTLEFEDHRPLYDWVVRECEMEHVPHQYEFARLNMTNTVMSKRKLKQLVDEKVVDGWDDPRMPTISGLRRRGYTPEAIRNFAQAIGVARADSVVDSKMLEHFIREDLKLKVSRPMAVIRPLKVVITNYPEGQVERLDADHNKENPEMGKRKIPFSREIYIEQEDFMEVPPPKYHRLYPGNEVRLMDAYFIKCEEVIKDDEGKIIEIRCTYDPETKSGTGFTGRKVKGTIHWVEATQAVPAEFRLYEPLIQDDYINPNSLEIRQGFVEPYMKEAKPQDKFQFPRHGYFNVDPNYTTPESLVLNLIVSLKSSFVI

SEQ ID NO: 35474 - protein, 527 aa, Desulfitobacterium hafniense Y51
MLQEKLEKIPKSKSVDARINPVVFWGSAILCVALYAPMMIFGTELQPFVAAALKAITYRMDWLWLLFALGCVIFSLWLAFGRYGNVKLGGPDDKPQFSNFSWISMMFTGGVGAGLVYWTMAEPIFYLKWPPYWGEAFSAQAAQFSLAYGIFHWGISAWAIFVPGAIAFAYMIYVRKKPYFYPSYACRGILGDRVDGWLGRVIDIFVIIGLVGGLGTTLGTVVPMISAVTANMLGVEDSMTVKVGVTLVISAVFGYSAYSGLNSGIKKLSELNSWLCMGLLAFVMLVGPTLFMLSMYVDSIGVWATNFLRMSLYTDPITKSGFPQDWTVFYWAWWAAWAMYFGLFVARISRGRTIRNVVVNMMIVTTIGCSLFFLVFGGYAVDLQLNQGVALDQTLAEFGGGAMITQVLNTLPLTAIVIPYFLFVMLIFQATTIDSNAYIISMIACKEVKNDQESPRWTRLFWCSALAVIGVAIMTVGGLPVVQLSSVATSVPTIIIIVILGMSLCKWLKEDFGKEKEVQVIDYPEED

SEQ ID NO: 35475 - protein, 361 aa, Desulfitobacterium hafniense Y51
MDAMIVLKKTTRNNLYTYALVIVAYLIVQLLISGGNISSSLQGQLVPICAYVILAISLNLTVGILGELSLGHAGFMSIGAFAGVVACISLEQIIPITILRLIVSLIVGALFAGVAGFLIGIPVLRLKGDYLAIVTLAFGEIIKNIINILYVGLDKAGLHISFLSDSNALNLGEGGRVIIDGPLGITGIPKLSTFTIGFVLILITLFIVLNLVDSRSGRAIMALRDNRIAAESVGIHITKYKLMAFVTSAALAGAAGTLFAMNYSTIIASKFGFNTSILILVFVVLGGLGNIRGSIIAATLLTILPELLREFNSYRMLLYAIVLILIMLATNNDAFKSHLGALKARLLPAKLRKEKGGAENG

SEQ ID NO: 35476 - protein, 231 aa, Desulfitobacterium hafniense Y51
MSTFVVWMTELLKWLYNLTDLVGFASYGLAIILLTIIIKTLIYPLTWKQMKSMRKTMEIQPKLQEIQKKYKNNPEKLNQETMELYKKHNLNPAGGCLPLLVQLPIFWALYNTLFHFDNYIADPSQAMFLWFSITENGNLVLAILAGATTFLQTKLTTASNPAMKAQNNTGKPDAAQSTQKMMLYFMPLFMAYITWTVPSGLGLYFFTMNIVSVLQQLYINRKLNKEQVEVA

SEQ ID NO: 35477 - protein, 196 aa, Beta vulgaris
MVGSLMAAWPVQGQTGWRKGPWTPEEDKLLIEYVNLHGEGRWSSVSRCAGLNRSGKSCRLRWVNYLRPGLKRGQITPQEEGIIIELHAIWGNKWSTIARYLPGRTDNEIKNYWRTHFKKKERTRKASEKRKSQTLKPKPLVQPQLQPQPKDEPLLHTQELISGSRNEPNNKIAPSTNNIEEQNLMAMIMASSSSSS

SEQ ID NO: 35478 - protein, 1079 aa, uncultured soil bacterium
MASNNKMSPIPQPPTRPVVGNMLSLDSAAPVQDLTRLAKELGPIFWLDMMGAPIVIVSGYTLVDELSVETRLDKVVRGALRRVRAIGGDGLFTADTAEPNWSKARNILLQPFGNRAMQSYHPSMVDIAEQLVKKWERLNADDEIDVVHDMTALTLDTIGLCGFDYRFNSFYRRDYHPFVESLVRSLETIMMIRGLPLENFWMRRRRSDLATDVAFMNKMVDEIVAERRKSAEASDGKKDMLNAMMSGVDRSTGEQLDDVNIRYQINTFLIAGHETTSGLLSYAIYALLKHPDVLKKAYAEVDRVLGADIEARPSYQQVTQLTYITQILKEALRLWPPAPAYGIAPLKDETIAGGKYSLKKNTFISILVTALHHDPAVWGPNPDLFDPENFSPEAEAKRPVNAWRPFGNGQRACIGRGFAMHEAALALGMILQRFKLIDHQRYQIRLKETLTIKPDGFKIKVRPRSGHDRTVHAEAATAAVATGAALPRARPRPGHNTPLLVLYGSNLGTAEDLATRVADLAEVNGFATRLAPLDDCAGQLPDSGGVLIFCASYNGAPPDNATKFVGWLRGELPNDAFAKLRYAVFGCGNRDWAATYQSVPRLIDETLSAHGGKRVFPRGEGDARSDLDGQFESWFAALGAAAVKEFGLESRFSRSADDAPLYSVEPVAPSAVNAVAALGGTVPMTILVSRELQNKSGPDASERSTRHIEVQLPGGMTYRVGDHLSVVPCNAPALVDRVARRFGFLPADQIRLAVAEGRRAQLPVGEAVSIGQLLTDFVELQQVATRKQIQIMSEHTRCPVTKPKLVAYVGDDADSSERYRADILSRRKSVYDLLEEFPAIELPFPAYLEMLSLLAPRYYSISSSPTGDASRCSITVGVVSCPASSTGRGLYRGVCPYYLASRREGESVFATVRETKAGFRLPDDPSVPIIMIGPGTGLAPFRGFLQERAARKAGGATLGPAMLFFGCRHPEQDYLYADELKAFADEGITELFVAFSRSEGPKTYVQHLLATQKARVWDLIEQGAVIFVCGDGSKMEPDVKATLVQIYRDCTGADANGGAKWIADLGAQNRYVLDVWAGG

SEQ ID NO: 35479 - protein, 357 aa, Medicago truncatula
MASSINNRKASEIFKAQALLYKNMYAFIDSMSLKWSVEMDIPTIIYNHGKPITLSNLVSILQIPSTKVDNVQRLMRLLAHNGFFEIVTNQELENEEEAYALTVTSELLVKGTELCLAPMVECVLDPKFNVSFHNFKKWIYEEDLTLFATSLGCDLWEFLNKNPEYNRLFNDAMASDSKMINLALKDCNFVFEGLDSIVDVGGGNGTTGKIICETYPKLRCVVFDRPKVVENLCGSNNLTYVGGDMFISVPKADAVLLKWILHDWTDRDCIKILKKCKEAVTTEGKRGKVIVIDMVINEKKEENELTQIKLLMNVTISCLNGKERNEEEWKKLFMEAGFENYKISPCTGLLSLIEIYP

SEQ ID NO: 35480 - protein, 361 aa, Medicago truncatula
MASTNNQLEATELFEGQSLLYMHMFGFLKSMALKWAIQLNIPDIIYNHGKPITLSDLVSTLQVPISKQSLVERLMRFLAHNGIFVIHEKGENDDDDDQAYALTPASKLLSKSCCKDHCLTPMVLMSTDPILMGKFHQLGDWICGEIPTLYEAALGSTVWEFLEGKPEYLSLFNQAMASDSQMVNLALKNCSKVFEGIDSIVDVGGGTGTTARIICEAFPKLKCVVYDLPQVVANLSSACDNLSYVGGDMFKSIPQADAIMLKWILHDWTDEICIKILKTCKESVSSNGKKGKVIIMDIIINEEDDEKDMTETKLCLDLIMMGINGKERTGKEWKHLFVEAGFKDYKIFPLFENRSLIEAYP

SEQ ID NO: 35481 - protein, 357 aa, Medicago truncatula
MDFKSNGSEETQLYHAQIHLYKHVYSFISSMALKSAVELGIVDAIHKHGKPMTVPELASSLKLHPSKVSVLYRFLRLLTHDGFFAKTTVKEETAYALTPPSKLLINGESTCFAPLVKGILHPCSLDMWHSSKKWFSEEKDLALYESAMGETFFNFLNKDSESDKLGLFQGAMAADSQMFKLALKDCSHVFEGLESLVDVAGGTGVVSKLIHEEFPHIKCTVLDQPQVVANLSGTQNLNFVGGDMFKSIPPADAVLLKWVLHDWDDELSLRILKNCKEAISGKGKKGKIIIIDVSIDETSDDHELTELQLHFDMVMMTLHNGKEREKKEWKKLIYDAGFSSYKITPICGFKSLIEVYP

SEQ ID NO: 35482 - protein, 363 aa, Medicago truncatula
MDSSSNGSEESQLYHAQIHLYKHIYSFINSMALKSAVELGIADAIHNHGKPMTLTELASSLKLHPSKVSVLYRLLRLLTHNGFFAKTTLMNGKEGEEETTYSLTPPSMLLISGKSTCLSPFVSGVLHPCRLNVWHSSKKWLTEDKELSLFESARGETFWDYLNKDTESDELSMFQEAMAADSQIFNLALKECNHVFEGLESIVDVGGGRGGFTKLIHEAFPDLKCTVFDQPQVVANLSGDENLKFVGGDMFKSIPPADAVLLKWILHDWNDELSLKILENCKKAISGKGKKGKVIIIDISIDETSDNHETNELKLDFDFMMMTLLNGKEREKKEWEKLILDAGFSSYKITPICGFKSIIEVYP

SEQ ID NO: 35483 - protein, 366 aa, Medicago truncatula
MARGDFSSNGSEENQLYHAQIHLYKHIYGFINSMALKSAVELGIADAIQNHGKPMTLTELASSLKLHPSKVSVLYRLLRLLTHNGFFAKTTLMSGKEGEEETIYSLTPPSMLLISGKSTCLSPFVTGTVHPCRLNIWYSSTKWLTEEKELSLFESARGETFWDYLNKDTESDELSMFQEAMAADSQIFNLALKECNHVFEGLRSIVDVGGGRGGFTKLIHEAFPDLKCTVFDQPQVVANLSGDENLKFVGGDMFESIPSADAVLLKWILHDWNDDLSLKILKNCKTAISGKGKTGKVIIIDISIDETSDNHETNELKLDFDFMMMTLLNGKEREKKEWEKLIFDAGFSSYKITPICGFKSLIEVYP

SEQ ID NO: 35484 - protein, 652 aa, Saccharophagus degradans 2-40
MCGIAGLVSPSLPIDSLKATATAMAQAIEHRGPDAMGVWVEQEQKLAFSHRRLSIQDLSESGAQPMHSHSKRYTIAFNGEIYNFLEIKKPLIDAGFEFRGHSDTEVLLCAIEHWGLEQTIAKAKGMFAIALWDSQTKVLTLIRDRIGEKPLYYGVINGSFVFGSELKAIFAHTPAKALTLNKVAIASFLRHGYISAPNSVFVEVKKLSPGCRIDINLAKQSDWSIANLTPQPYWTVAQSANQPYLYTEQNQSEAISALDEKINKVINEQSIADVPLGAFLSGGIDSTVVSAVLQANTSTAIDTFTIGFEEKSFNEAEFAKEIAKHLGTKHHEHYVNQQDILELVNILPRVYDEPFADASQLPTILVNRFARSELTVCLSGDGGDELFAGYNRYVFTEAVLKKAAALPAVFKSILKALITSVAPGKWDKLYQALNSIAKRKGGAEFGNKLYKMVSLADAKSKAAAYEYLMSYWQQPEQVLKAFNGELAMQSPLSLEDDFINAAMAWDQQWYLPGDNLTKTDRASMAASLELRAPLLDIELIDFAWTVSPELKVRDGKSKWLLREVLYKYVPKELIERPKMGFSVPISQWIRTDLSAWVDELLDKEFIEKQGIFNYAPIQHALLEHRSGSYDHGKKLWTLLMFQAWFKTNIIDG

SEQ ID NO: 35485 - protein, 432 aa, Saccharophagus degradans 2-40
MKNTMIYKLIQNDTLGRYVLAALFALTVLVPLSNILMPEGSFLHVPTYTMTLIGKYLCYALLALALDLVWGYCGILSLGHGAFFALGGYAMGMYLMRQIGDRGMYGNAELPDFMVFLNWQELPWYWMGFDNFGFAMLMVLLVPGLLAFVFGWLAFRSRVTGVYLSIITQAMTYALMQAFFLNDFGFGGNNGLTDFKDILGFDIQANATRITLFMLSGGAVICAYLLCRFITTSKFGRVLVSIRDAESRSRFLGYRVEHYKLFVFVLSAVLAGIAGALFVPQVGIINPGEFNPVNSIEIVIWVALGGRGTLYGAVIGAVVVNYVKSFYTGAMPEMWLFMLGGIFVVSTIYANAGVIVGVIISVVASSFYMLLCKLFGMDINGFVMLIFALVSLYGCAKYFDNLVAWLKPKFLALGFVEKLLANKAQAVTEEAK

SEQ ID NO: 35486 - protein, 411 aa, Saccharophagus degradans 2-40
MENSIFELQYALDTFYFLVCGALVMWMAAGFAMLEAGLVRSKNTTEILTKNVALFAIACIMYFVCGYAIMYGGDYFLTTITGDGVTGAEEPASYAPSADFFFQVVFVATAMSIVSGAVAERMKLWAFLAFAVVMCGVIYPVEGGWTWGGNSVFGMYTLGDLGWSDFAGSGIVHMAGAAAALAGVLVLGARKGKYGPNGQINAIPGANLPLATLGTFILWMGWFGFNGGSVLATASVESANSVAIVFMNTNAAAAGGLVSALILARILFGKADLTMALNGALAGLVAITAEPSTPSALQATLFGGLGGLLVVFSILTLDKLKIDDPVGAISVHGVVGLLGLLLVPVTNDASSFSGQIIGALTIFTWVFGTSLAVWFLIKLVIGVRVSEEEEFEGVDLSECGMEAYPEFTNGK

SEQ ID NO: 35487 - protein, 586 aa, Saccharophagus degradans 2-40
MSTPAKPTSVESYKRLLSYAFKYKAYFIISFIGFGVFAAMEAQLINILEYFVDRLEGRPSAPVLGLSADVTSSLWFVPISVVVLSIIRGIGAYFGNFYMSLVGLNVITNLRRQIFSQMIYLPQSFYDTKNSGELISLLVYNIEQVTGSVTNAVKTLFRDGMSVAWFLAMMLIINWKLTLAFICVAPVLGGLMYIASKYFRKVSHKIQSAVGRVSHVATESIQGIKLVKSYGGEKYELDRFNDATNQNLHYGTKFERVSAFQTPVLHIVLALALAVTFYLIMILWDSDSSKAVVYATYAAAIAKPFRQLTKINSIIQKGLAAADTIFEVLDLQAEPNSGQQKLNAPKGRVELKDVHFGYNQDTPALNGISFAIEPGQTVALVGSSGSGKSTIVSLLLRFYDNQQGSITIDGTPIQSLELHNLREHIALVNQQTILFNDTIAANIAYGSEHIDEARIQDAAKQANAHDFIMALPNGYQTPAGEDGSRLSGGQRQRIAIARALYKNAPILILDEATSALDNESEKQIQSALDELKQGRTTLVIAHRLSTIENADTILVMDNGRIVEAGNHQTLLDRSGVYANLYHSQFS

SEQ ID NO: 35488 - protein, 473 aa, Saccharophagus degradans 2-40
MHKPNLVWIIDDDRSIRWVLEKALQQAGITTTSFESGDKAVEHLAQEKPDVVISDVRMPGMNGLTLLTHLHKEIPNLPVIIMTAHSDLDSAVAAYQGGAFEYLPKPFDVDEAVAVTQRALSHAQEQRVEAPAAQPAVDTEIIGEAPAMQEVFRAIGRLSQSNITVLINGESGTGKELVAHALHKHSPRREGQFIALNMAAIPRDLIESELFGHEKGAFTGAGAQRQGRFQQADGGTLFLDEIGDMPAETQTRLLRVLADGEFYRVGGHTPIKVDVRIIAATHQNLEGLVEENRFREDLFHRLNVIRIHLPKMADRREDIPKLAQHFLRRAAEELGVEPKTLTPETEAYLSHLSWPGNVRQLENTCRWITVMASGREVHIADLPPELMEARTAEAPSGDWEKALRHWADQALACGQSDILSDAVPTFERALIETALKHTAGRKRDAANLLGWGRNTLTRKLKELGMASSEEEVE

SEQ ID NO: 35489 - protein, 391 aa, Saccharophagus degradans 2-40
MKIAIPRERRACEKRVAATPETVKKYVGMGFEVLVEKDAGTASRYMDDQYVAAGASIIGSMQELYSQADIVLKVQRPLLASEGGEDELGCMKSGALLLAVLSPYSAPEALDAYAKQGVIAIALEFVPRITRAQSMDVLSSQSNLAGYRAVLDAAYEYGRGFPMMMTAAGTIAPARVMVLGAGVAGLQAIATAKRLGAIVSATDVRPVAKEQVESLGGKFVMVESDELKDAETAGGYAKEMSDDFKRKQAALVAETLAKQDIAICTALIPGRKAPTLITDEMVHSMKPGSIIVDLAVEQGGNCTLSKPGEVVEVNGVKIVGHFNVPSRVATDASALFAKNLLNYLTPHVKAGEGSVELALDWADEIVAASVLTRAGDIVHPNFAAPAAAANQ

SEQ ID NO: 35490 - protein, 402 aa, Saccharophagus degradans 2-40
MKFVDEAPIFVHAGKGGNGCMSFRREKFIEKGGPDGGDGGDGGSVYLEADENLNTLVDYRYQRSFRAQSGEGGRGRNCTGAKGEDLILPVPVGTSVIDMETEEVIGDLTKAGDRLLVAQGGFHGLGNARFKSSVNRAPRQTKPGSEGEDRQIKLELKVLADVGMLGLPNAGKSTFIRSVSSAEPKVADYPFTTLVPSLGVVKVQTHRSFVVADIPGLIEGASDGAGLGIRFLKHLTRCRILIHLVDVNPIDESSPVESARAIVDEINKFSPTLAQRERWLVLNKCDTLSEDEVAEVERQIREALNWVGPIYKIAAISNTGTAQLCEKLLGHLEVLWQKERDNEELAEQEHEVQLQMQQEARERIALLQQRHRAAKAAAKGRALDNDDDDEDDDHEMEIHYVP

SEQ ID NO: 35491 - protein, 126 aa, Saccharophagus degradans 2-40
MQITLLKGKLHMAKVTQAELWYDGSCAIDEEFVKLAGLREFEQIEIYNVDNGERFSTYVILAEAGSRTISMNGAAARKVQVGDRVIIAAYSQMSEAEADSFKPRLVYLDKDNAVERTTNTIPVQAA

SEQ ID NO: 35492 - protein, 520 aa, Saccharophagus degradans 2-40
MQLETIDIVLFVAYVIGLIALALWVSREKPGHNTNTSDYFLAGNSLPWWAIGASLIAANISAEQIIGMSGSGFKIGLAIASYEWMAAITLIIVGKYFLPVFLKRGIYTMPQFLEQRYDHRVRTILAVFWLGVYIFVNLTAVLWLGALAINTITGVDMIYGMIFLGTFSVVYSLYGGLKAVALTDIVQVLVLVAGGLILSYICLDLLGKGDGVIAGFSVLTHAVPEKFDMILEEGNPNYMDLPGLSVLLGGMWVMNVSYWGFNQYIIQRTLAAKSLAEGQKGIAFAAYLKLLMPVIVVLPGIAAVILAPDLAKPDQAYPEMMTLMPSGIKGIVFAALVAAIVSSLGSMTNSISTIFTMDLYCHMKPNESQTHYVTVGRTVALVSLILAIICAKPLLGSFDQAFQYIQNFTGFFTPGICVLFLLGLFWKKATANGALAAALVSFVASIAFFFAAPNVPFMDRVAIVFLLSFITAIFVSILEGNKDQEKAVDLEGINFKTKTSFNIATLGVIAILIALYATWW

SEQ ID NO: 35493 - protein, 399 aa, Saccharophagus degradans 2-40
MSQSGRRLLVIDDDTIVRQSIAAYLEDSGFLVHQEADGHSALTWLMDNPPCLVLTDLRMPGTDGLTLLKAIREWDVELPVIVISGAGAVHDVAEALRHGASDYLVKPIVDMEVLVHSIRRALERHELIIENRQYRLELEKANKELKEYIRVLERDQLAGRRVQSKLLPPPAVSFGGINVDYKIIPSLYLSGDFVDYGFLSNRYLAFYLTDVSGHGAASAFVTVWLKQIVRRFFREQEIFNTKDSFERDTASLLKLINKEVIRSKVGAHMTCFVGVIDTHTHEMRYVVAGHLPLPLLIANGRAEYLEGKGKPLGIFEDAEWEVQSIQLPLQQQFSLVVFSDGVLEVLPPDNLIEKENYLRNILSKQQGSIEDICAALQINSLDAAPDDIAVLKIDNEMLK

SEQ ID NO: 35494 - protein, 423 aa, Saccharophagus degradans 2-40
MTLPKDPESSTVKPVKKDKRKNIIKSEKLLGVCYDIRGPVLEHANRLEEEGHRILKLNIGNPAPFGFEAPDEIITDVVYNIREAQGYTASRGLFPARKAIMHECQRQEIPNVEIEDIFLGNGVSELIVMANQALLNNGDEVLVPSPDYPLWTAAVNLAGGKAVHYMCDEQSDWFPDIDDMRSKITSRTRAIVVINPNNPTGAVYSQELLEQIVALAREHQLVIFADEIYSKILYDDAEFVPMGRIAKDVLCVTFNGLSKSYRLAGFRSGWIILSGAKHLAKDYIRGIDMLASMRLCANVPAMLAVQTALGGYQSINELILPGGRLLEQRDAAIEELAKIPGVSCVVPKGAIYLFPKIDRTMYDFDDDQQLILDFLIQEKILLVQGTAFNWKQPDHFRIVFLPQADQLRQAIIKFGEFLQQYRI

SEQ ID NO: 35495 - protein, 178 aa, Saccharophagus degradans 2-40
MGSELINQAAVMVLLSEGPGGERVLLTRRAEHLNQHAGEIALPGGKWEPADPDLLTTALRETHEEVGIPPWKVEVLGTLPAAYTRRGVKVTPYIGRVAHDVELVANLEELDEMFWIPIEFLKQDKRKRTDRYQHLGQVFWAPAYVYEQHLVWGFTARVLVELLRVHYGVVLQAPEGAC

SEQ ID NO: 35496 - protein, 378 aa, Saccharophagus degradans 2-40
MKLVIGVVRESALGESRVAIAPDVVQKLNKLGVQVVMQQGAGASAFLPDEKYKQDNVTLVESAADVYAKANLFIRVQTPSLDEIAQMPEGSYLLGALTPHKHLAEIKALADKKITCWATEYIPRISRAQSMDTLSSQAAVAGYVGVVKAAGLSAKFFPMLTTAAGTVRPAKVLVLGAGVAGLQAIATAKRLGAVVEAYDIRPETKEQCESLGAKFIDTGVNAAGEGGYARELTAEEVVKQTEIVDQHIAKADAVITTAAIPGRPSPKLISASAVAKMQPGAVIIDLASEGGGNCELTKPGEIYQHEGVVICGELNVPAQLAVHASEMFSKNLFNFISPWLKDAQLVVDWEDEIISQSCLVKEGEVVNSRIQTLLGGGA

SEQ ID NO: 35497 - protein, 408 aa, Saccharophagus degradans 2-40
MSLFVQKFGGTSVGTVERIKAVAKKVAGFRDQGHDIVVAVSAMSGETNRLIALAKEMQATPDPREMDVLVSTGEQVTIALMCMALKDLGYDARSYTGTQVKILTDSSHMKARIQDIDVAPMKADLAAGRVVVVAGFQGVDENGNITTLGRGGSDTTGVALAAALKADECQIYTDVDGVYTTDPRVVSSAKRLERITFEEMLEMASLGSKVLQIRSVEFAGKYNVPLRVLSTFDDGPGTLITLDEEYSTMEQPVVSGIAFNRDEAKVSILGIPDAPGVASKILAPIGDANIEIDVIVQNVAADNTNDLTFTVNRADVDKARAVVERVATELGAREVVTDDKIAKISIVGVGMRSHAGVASTMFKSLAADAINIQMITTSEIKISVIIDERYLELAVRGLHTAFGLDKDQ

SEQ ID NO: 35498 - protein, 407 aa, Saccharophagus degradans 2-40
MMQKPMYFDYAATTPVDERVAEAMIGCLTRDGNFGNPASRSHLIGWQAEEAVEIARGDVAKLIGCDTREIVWTSGATESNNLAIKGALEALLQNEEQASSTVTHHVVPHHTVPHIVTSAIEHKAVLDTCAELQRRGCEVTYLTPPADGVIRAAQVAEAMRPQTRLVSIMHVNNEIGVINEIAGIGKNCRDSGVLFHVDAAQSAGKVEIDVASMCIDLLSISAHKMYGPKGIGALYVRRSPDVNIAAQIHGGGHERGMRSGTLPTHQIVGLGKAAAIAKQEMVAESKQLLALRDLFLSQLQQLTCWQLNGSKEQRVPGNLNISFADVEGETLLMSLRDIALSTGSACTSASLEPSYVLSAIGVPSELAHSSLRISLGRYTTETEVKMAADKITAAVTSLRKSPPVRYA

SEQ ID NO: 35499 - protein, 249 aa, Saccharophagus degradans 2-40
MLSIKNLHARVEEKDILKGLNLEIKPGEVHAIMGPNGAGKSTLGNVLSGREGYEVTDGEVLFDGKNLLDWETEERAREGLFLAFQYPVEIPGVSNMEFLKASVDAVRAHQGLPAYDSVSFLKEARARCQEVDLKQEFLKRGVNEGFSGGEKKRNELMQMMLLQPKLCILDETDSGLDIDALQVVAKGVNALRSPDRSFIVVTHYQRLLDYIEPDFVHVLADGKIVKSGDKSLALELEEKGYGWLENEVA

SEQ ID NO: 35500 - protein, 897 aa, Saccharophagus degradans 2-40
MTLLDNLKEMTMEFEKLVKNLSNESKELFEKSIALASSRSHFYIDVEHWLTEALAEEQREIIAILKHFNVDVDRVHADLDLALENTKTGNDGFPKISPDIVRLLFEAWMIASSQYASVQVLPVHILLALVDSAGLKTKIGKISKQFEAISGEEIRTQCETLLRGEALQDQGEATNKKLTKTPSLDQFTTNLTQQAKDGKIDSILGRDDEIRQIIDVLCRRKQNNPILTGEAGVGKTAVVEGLAVKIAQGDVPTAIENVEIRSLDLGLLQAGAGVKGEFENRLKNVIKEVQQSVQSIILFIDEAHTLIGAGNQAGSGDAANLLKPALARGELRTIAATTWAEYKKYFESDAALTRRFQVVKVEEPSVDKAIIMLRNAAPTLEQHHKVVILDAAVSASVNLSHRYIPGRQLPDKCVSLLDTACARVNLSQNTTPARIVQYSQEIKNIEFEIERLNQEAEKGYEHSASIVELEVKKVGITERYQSLCARWEQEKQIINQINSAREKAEEKVQDSDNEESATDLTNTLIAELRVKLKSISGSQPLIYECVDEQVVAEVVADWTGIPVGRMQSDEIQNVLSLEQTMEKRVIGQSHGLKLISKAVQTARAKLSDPKRPLGVFMLVGPSGVGKTETALTLAEQLYGSEQNMTVINMSEFKEEHKVSMLMGSPPGYVGYGEGGVLTEAVRRKPYSVVLLDEMEKAHPGVQDIFYQVFDKGILRDGEGRDIDFKNTVIIMTSNTASAQIEQLCIDPETKPEPKALLEAIEGTLRETYKPAFLGRINLIPYYPLDEQCLSEIAVMQLHAIQQRVETNYKVELNYSDKLVEHVVSLCAQSDTGARKISALLNNTLLPVLAEKILTEIALDKALESVEVDVSEEGEFVVKINSKKENTDDMKIKKTVTG

SEQ ID NO: 35501 - protein, 391 aa, Saccharophagus degradans 2-40
MSLQPRDVVIVDYARTPMGRSKNGCYRNVRADDLSADLITGLLARNAALDPAQIDDMIWGCVMQRGEQGFNVARNILLRAGLPHTVPAQTVNRLCGSSMSALHTAAANIMAGLGDVYLVGGVEHMGHIDMNQHVDPNPALGHSVAQAAGSMGLTAEYLSLLHGITREAMDEFGARSHRKAAEATEQGKFAREIIARIGHDETGAPTLIKHDETIRPDTTVEALSKLKPAFNPKGGTVTAGTSSQITDGASSMLVMSAAKAAELGLTPIAKIRSMALAGVDPSIMGYGPVPATQKALANAGLSIEDIDVVELNEAFAAQALPVLKDLNLLDAMEDKVNLYGGAIALGHPFGCSGTRITGTLLSVMQDKDATLGVSTMCIGLGQGITTIVERV

SEQ ID NO: 35502 - protein, 89 aa, Saccharophagus degradans 2-40
MPTGTVKWFNNAKGFGFILPDAGGEDLFAHYSSIEMEGYRTLKAGQPVTFEIEKGDKGLHAKNIQCTDLPETSEQQPTVEQSIAETEPG

SEQ ID NO: 35503 - protein, 75 aa, Saccharophagus degradans 2-40
MSDRTKGTVKWFNNARGYGFITAGATEEKEGDDIFVHYRSIRGEGYKSLNEGQAVEFSLQQGDKGFHADDVALIG

SEQ ID NO: 35504 - protein, 407 aa, Saccharophagus degradans 2-40
MNLEIILGVGMFTVIVLALVVIILSARAKLVSTGDVKIEVNGEKTIVVPAGGKLLQTLASNNLFLASACGGGGTCAQCKCVVEEGGGSILPTEESHFTKREAGEGWRLSCQVPVKQDMKIEVPEEVFGVKQWECTVESNPNVATFIKELTLKLPEGENVDFRAGGYVQLEAPAHHVKFKDFEIEEEYRGDWERFGFFNLESKISEPCIRAYSMANYPEERGLVKFNIRIATPPPGSKGIPPGQMSSYVFSLKPGDTITVYGPFGEFFAKETEAEMVFIGGGAGMAPMRSHIFDQLKRLDSTRKISFWYGARSLRELFYQEDYDGLAAEKENFDWHIALSDPQPEDNWEGLTGFIHNVLYDQYLKDHPAPEDCEFYMCGPPVMNAAVIKMLKDLGVEDENIMLDDFGG

SEQ ID NO: 35505 - protein, 590 aa, Saccharophagus degradans 2-40
MANGLTFFASALYTANTFALDRACIFMTDTPLGSAETEAGNDKPLNFLEQIIKKDIDEGRCNGLVTRFPPEPNGYLHIGHAKSICLNFGLAERFGGVCNLRFDDTNPAKEEMEYVEAIKADVEWLGFTWGGDIKYASNYFDQFYGWAQHLIKNGKAYVCDLNAEQAREYRGTLKEGGKPSPYRERSVEENLDLLERMKNGEFDEGAKTLRAKIDMSHGNINMRDPILYRIRKQSHHQTGDKWCIYPSYDFAHGQEDAIEGVTHSICTLEFADHRPLYEWFIENLPVPSKPKQYEFGRLNLNYTVTSKRKLKQLVDEGVVTGWDDPRMPTIAGYRRRGYTPAAIRKFCEMIGVTKSDGVVDVAMLEHAIRDDLDKNAPRAMCVLNPLKVTLTNYPSDKTEVFTAAGHPNRDDLQSRELPFGQVVYIDKEDFREEANKKYKRLVIGKRVRLRNAYVIEADEAIKNDAGEIIEVKARIIENTVGNDPEDGVKPKGVIHWVAAHDCVDAEVRLYDRLFVDEAPDAGNKDFMETINPESLTVLTNCKLEKSLAMATAGQGFQFEREGYFCRDAKEPGLVFNRTIGLRDSWGKKDA

SEQ ID NO: 35506 - protein, 69 aa, Saccharophagus degradans 2-40
MSDKLNGTVKWFNESKGYGFISREGGNDLFVHFSNITGSGFKTLKEGQSVSFTEGMGQKGPQAENVEPL

SEQ ID NO: 35507 - protein, 554 aa, Saccharophagus degradans 2-40
MYVYDEHDHKIIQERVAQFRDQTNRYLAGELKDEEFLPLRLQNGLYIQRLAPMLRIAVPYGLLSATQVRKLAHISRVYDKGYCHMTTRQNVQFNWPNLEDVPDILAELAEVEMHAVQTSGNCIRNVTSDQFAGVATDEIVDPRPYCEIIRQWSTFHPEFAFLPRKFKIAVSGSVDDRAAIHFHDIGLQIVKSENGSVGFKVLVGGGLGRTPVIGSVIREFLAENDLLTYLEAILRVYNLHGRRDNKYKARIKILVKAMGPEEFAKRVEAEWEHIRDSQTLLTDKEIKRAKSFFTAPDYEAIDVQAAEAELANAASENKAFSNWLARNVTAHKVDGYKAVTLSLKPTGIAPGDVTDKQLEIIADLADKYSFGELRATHEQNIVLADVKVSELFNLWQEAKAAGFATANIGTLTDIICCPGGDFCSLANAKSIPIAEAIQREFDDLDYLYDLGDLDLNISGCMNACGHHHIGHIGILGVDKKGAEFYQVQLGGNAGNNAALAKVLGPAFSAEDMPTVVRKLVDVFVEKRVEGEQFFETYNRVGIEPFKERIYAKAS

SEQ ID NO: 35508 - protein, 298 aa, Saccharophagus degradans 2-40
MSSEKTYAGYIAIVGRPNVGKSTLLNHVLEQKISITSRKPQTTRNNVVGIKTEGGVQMVFVDTPGIHLGHDKAINRFMNKSASSALADVDTVVFVVDKQHWTPEDEHVLSQVINVKCPVIIAVNKVDQLEDKNSILPHLQRLAEKLPKAEIVPISALKGQNLDRLEALIKSYLPEATHFYPDDQITDRSSRFMAAEIVREKITRQLGAELPYQMAVEIEEFQHEGTLITIHALILVERDGQKRILIGDKGEKLKAIGSQAREDMERLFDCKVMLKLWVKVKSGWSDDERALRSLGYTD

SEQ ID NO: 35509 - protein, 470 aa, Saccharophagus degradans 2-40
MFKTLQHASRKLSPTFSSVKKLAAPFALLMASSAYAEMLDVEKDELTFGFIKLTDMAPLAIAAEKGFFEDEGLFVKLEAQANWKVLLDGVIDGKLDGAHMLAGQPLGATIGYGTSAHIVTAFSMDLNGNGITVSNEIWEQMKGNIPHENGKPVHPISASALKPVIEKYRNEGKPFNMGMVFPVSTHNYELRYWLAAGGINPGYYGPGASGNVGQIAGDTLLSVTPPPQMPATMEAGTIYGYCVGEPWNQQAVFKGIGVPVITDYEIWKNNPEKVFGVNSKWAEENPQTHLAVVKALIRAAIWLDENNNANRKEAVKILSNPNYVGADYEVIANSMTGTFEYEKGDKREVPDFNVFFRYFANYPYYSDAIWYLTQMRRWGQIAEDKPDSWYHETAKKVYKPDVYLEAAKLLVAEGKAKKEDFPFDTDGYRAPQAEFIDNITFDGREPNAYLAKLPIGLKAGEKVTSAGVTK

SEQ ID NO: 35510 - protein, 409 aa, Saccharophagus degradans 2-40
MSTNSSIKKVVLAYSGGLDTSVIVKWLQETYNCEVVTFTADIGQGEEVEPARAKAEALGVKEIYIDDLREEFVRDYVFPMFRANTIYEGEYLLGTSIARPLIAKRLIEIANETGADAISHGATGKGNDQVRFELGAYALKPGIHVIAPWRDWDLTSRETLMDYCAKHNIPVDYTKAKKKSPYSMDANLLHISYEGGILEDPWAEAEEDMWRWSVSPEAAPDQPEYLELTFKHGDIVAIDGVEMSPATVLETLNKRGGAHGVGRLDIVENRYVGMKSRGCYETPGGTIILRAHRAIESITLDREVAHLKDSLMPKYAEMIYNGYWWSPERQMLQTAIDNSQGPVNGDVRVKLYKGSVTVVGRRSNDSLFDEKIATFEDDAGAYNQKDAEGFIKLNALRMRIAAQKGRKLL

SEQ ID NO: 35511 - protein, 110 aa, Saccharophagus degradans 2-40
MDIIETIKKQIEENSIILYMKGSPNAPQCGFSAKASQAVMACGQRFAYVDILSNPDIRANLPKYANWPTFPQLWVNGELVGGCDIIVQMHESGELKPIIDAAAPKEEASE

SEQ ID NO: 35512 - protein, 876 aa, Saccharophagus degradans 2-40
MRIDRLTNQLQVALSDAQSLAVGRDHSQIESIHLMQAMLDQQGGAVRPLLARAGFDVPGLRNELTKQLEALATVTNPTGDVNMSQELGRLLNLADKYAQKVGDKFISSEAVLFAGISDKASNLGKLLNTYGQPDRLKQAIAAVRGGETVDDPEAEGNRQALEKFTVDLTARAEAGKLDPVIGRDDEIRRTIQVLQRRTKNNPVLIGEPGVGKTAIVEGLAQRIINGEVPEGLKNKRLLSLDLGSLLAGAKFRGEFEERLKAVLNELSKQEGRIILFVDELHTMVGAGKADGAMDAGNMLKPALARGELHCVGATTLDEYRQYIEKDAALERRFQKVQVDEPNEEDTIAILRGLKERYEVHHGVNITDSAIIAAAKLSQRYITDRQLPDKAIDLIDESASRIRMEIDSKPEEMDKLERRLIQLKIEREAVKKDEDIASKERLKKIDSQINEIEKSFADLDEIWRAEKAALQGSQEIKSHLEKARLDLEAARRAGDLGRMSELQYGIIPDLEKQLDMAAQADMHEMKLLRNKVTEEEIAEVVSKWTGIPVSKMLEGERDKLLRMEDDLHKRVIGQHESVVAVSNAVRRSRAGLSDPNRPNGSFLFLGPTGVGKTELCKALAEFLFDSQDAMVRIDMSEFMEKHSVARLIGAPPGYVGYEEGGYLTEAVRRKPYSLVLLDEIEKAHPDVFNILLQVLEDGRLTDGQGRTVDFRNTVVVMTSNLGSSAIQDIAQNKSFDTISFDNESGAEEQNQYRYQAMKDAVMEVVTGHFRPEFINRIDEAVVFHPLAQQQIAGIADIQLETLRKRLAERDLRLNVTPEVMAKLAEAGFDPVYGARPLKRAIQQLVENPLAQHILKGEFIAGDTISATLEEGEITFRK

SEQ ID NO: 35513 - protein, 1481 aa, Saccharophagus degradans 2-40
MSTGLYRLDEFKDNCGFGLIAHLKGQASHKLLQTGIEALTCMTHRGGIAADGKTGDGCGLLIQKPDSFLRTVAAELNFTLADTYGVGAVMLSKDSKAAEAAKTVVEEELARQGLTEILWREVPTNSECLGPIALESEPSIYHLLVNGADADLQAFNSKLFVARRKSEIRLAKDEAFYIASLSSSVLSFKGLMMPVDLPRYYLDLADARLETGICVFHQRFSTNTMPRWPLAQPFRMLAHNGEINTIMGNRNWSVARTKKFQTDLLPNVDEIVPLVNRTGSDSSSLDNMFELLLTGGMELHRAVRMLVPPAWQNVEHMDDELKAFYEYNSMHIEPWDGPAGLVLTDGRHAVCTLDRNGLRPSRWVITKDDCITVASEIGVYDYKPEDVVAKGRLGPGQILSVDTFTGELHHTKDIDEMLKKGQPYQKWLQDNALRIESKLAGDVAENGLTADEVKTAMKMFQVSFEERDQVLRPLAEAGQEAVGSMGDDTPMAVLSAKERSLYDYFRQQFAQVTNPPIDPLREAIVMSLETCIGRELSVFDETEDHANRVILSSPVLSPAKFRALLDLNRKGYDAKRFDLNYDASTLNLKQAIELLLEKIVVAVKQGTALVILSDIELKEGTLPIHALLATGAVHHRLTREGLRCDANIIVESGTIRDSHHAATLIGYGATAVYPYLSYYVLNNLIESGELLMDTGDAYRNYQKGLDKGLLKILSKMGISTVASYRGAQLFEAIGLDEDVIDTCFVGTPSRIKGAGFVDLEADQKAIAVDAWKKRKPIAPGGLLKYVHGQEYHAFNPDVVQTLQKAVKSGNYSEWRDYAELVNNRPVATLRDLIGLRGGTTPIPLDEVEPVSEIVRRFDSAAMSLGALSPEAHEALAEAMNTLGGRSNSGEGGEDPIRFGTLKMSKIKQIASGRFGVTPHYLVNADVLQIKVAQGAKPGEGGQLPGGKVNALIARLRYSVPGVTLISPPPHHDIYSIEDLAQLIFDLKQVNPHALVSVKLVSRPGVGTIAAGVAKAYADLITISGYDGGTAASPLTSIRYAGSPWELGLSETHQTLRANGLRGKVRVQTDGGLKTGLDVIKAAILGAESFGFGTAPMVALGCKYLRICHLNNCATGVATQQDKLRRNHYIGTKEMAINFFSFVAEETREWMAKLGVRTLEELIGRVELLELLDGKTSKQQKLDLSPIIYTDEYLQTKPQFCGVDRNRPFDEGLLAERMVEEVLPAIEAKQGGEFNFHITNCDRSVGARISGEIAKRYGNQGMADKPITLKLTGIAGQSFGVWNAGGLNMYLEGDANDYVGKGMAGGKLVIRPPKGSTFASQNTSIMGNTCLYGATGGKVFAAGGAGERCGVRNSGAHVVVESAGDHCCEYMTGGVVTVLGETGVNFGAGMTGGFAYVLDENNNFVDRYNHELVDITRVNTEALEAHRNHLRSVIEEFVEETESEWGKTLLANFNDYVGKFWLVKPKAAGLDSLLVSVKKRGE

SEQ ID NO: 35514 - protein, 643 aa, Saccharophagus degradans 2-40
MGKIIGIDLGTTNSCVSILEGNKAKVIENSEGDRTTPSIVAFTEDGEILVGQSAKRQAVTNPQNTLFAVKRLIGRKFTDDVVQKDISMVPYKIIAADNGDAWVEVKGDKKAPPQISAEVLKKMKKTAEDYLGETVTEAVITVPAYFNDSQRQATKDAGKIAGLDVKRIINEPTAAALAYGMDKSKGDSTIAVYDLGGGTFDISIIEIADVDGEHQFEVLSTNGDTFLGGEDFDLRLIEYLAEEFKKTNGIDLHNDPLALQRLKEAAEKAKIELSSSQQTEVNLPYITADATGPKHLVVKLSRAKLESLVEELVNRSLEPLKMAIKDAGVSVSDIDDVILVGGQTRMPMVQAAVAKFFGKEPRKDVNPDEAVAMGAAIQGAVLSGDVKDVLLLDVTPLSLGIETMGGVATPLIEKNTTIPTKKSQVFSTADDNQTAVTIHVVQGERKQASQNKSLGRFDLADIPPAPRGMPQIEVTFDIDANGILNVSAKDKATGKEQSIVIKASSGLSDDEIEKMVQDAEANADADRKFEEVVTARNTLEGLIHATKKTLEEAGDKATADEKSAIESAIAEAEEAAKGEDKDAMEAATKKLTEASSSLAQKLYAEQGAAGAGAAGAADAAADQPADDGAVDAEFEEVKEDDGK

SEQ ID NO: 35515 - protein, 269 aa, Saccharophagus degradans 2-40
MSYLAPAEFATKMVDAGESKVFMSTRDTLIRAYMAGAILALAAVFAVTIAVQTGVFLIGAILFPVGFCMLYLMGFDLLTGVFVLAPLAWLDKRPGVTVKGILRNWGLVFLGNFGGALTVAFMMAFIFTYGFNVEAGAIGSKVAGIGEARTLGYAEHGVAGWITIFIRGMLCNWMVSLGVVGAMISTSVSGKVIAMWMPIFLFFFMGFEHSVVNMFLFPFGLIMGGEFSVMDYFIWNEIPTALGNLVGGLAFTGLTLYTTHVRTGAKRTA

SEQ ID NO: 35516 - protein, 366 aa, Saccharophagus degradans 2-40
MTTHTLRVARVENPTANSKAIYFEPNSLPAAFAGQFLTLIVRPNDKELRRAYSLFTTPEEGLAIGVKRVPGGIVSNYLNTYARAGMEIQVAGPSGNFTYRPEKNTGAKHLILVGGGSGITPLMAILKTALAQQHVEHITLLYANTCEQEIMFAHELNTLAEANREKFTLIHYLNSENTQQIKQRQKGLLGWLGKTTSYTTAGFLTQEKALEILKQHNIAVSNTQQPSTYAYLCGPGGFMTLAEQALLNIGVASTNIKKENFVASAPSNPTPNFTPPNCEARVKIAGDYKRFTVPSGKNILQAAIDANIDWPFSCREGSCTACYSRCTSGQVHLLSDSALSNQELAEGGVLPCVGFPKSKKLELVID

SEQ ID NO: 35517 - protein, 595 aa, Saccharophagus degradans 2-40
MTESSPNFAQLGLNEHILKALTDVGYETPSPIQAKSIPELLAGRDILGQAQTGTGKTAAFALPILNNLDLSQKAPQVLVLAPTRELAIQVAEAFQSYAHHLPGFHILPIYGGQGYDQQIRALKRGVHVIVGTPGRVMDHMRKGTLKLDQLKVLVLDEADEMLRMGFIDDVEWVLTQTPPTRQIALFSATMPKEIAKVANKYLNDPALIKIEVKTQTADTIRQRYWGVSGHHKLDATTRILEAEEFDAMIIFVRTKTTTIELAEKLAARGYSSAALNGDISQNLRERTVEKLKKGQIDILVATDVAARGLDVDRISHVLNYDIPYDSEAYVHRIGRTGRAGRSGEAILFVAPREMRMLRTIEKATRKPIELMKMPSTDDINQIRVDRFKQKILDAAKSPGLEFFRKLVTEMQHDNELDTADIAAALALLYQGDQPLLLEDRPQRQQREFKERDGDFDKRGRGDRDGRGREGRDRGKGREKDENMETYRIEVGRKDGVKPGDIVGAIANEANISSKFIGHIKLHDDFSTVDLPSGMPKEVFETLSKTWVCQKQLRITRAEGNAGGGRGRGGDDFKRKKRPANKDGAPRKPRAKKADS

SEQ ID NO: 35518 - protein, 392 aa, Saccharophagus degradans 2-40
MSDPIVIVGIARTAMGGMQGMFSDVSAPQLGAQAIKGALEDAGLATSDVSEVFMGCVLPAGTGQAPARQAALGAGLDKGVPTTTVNKVCGSGMKTVMMGCQAILAGEAEVVVAGGMESMTNAPYMLTKARGGYRLGHGQVMDHMFLDGLQDAYEGELMGNFAEATASKYGFTREAQDAFAIESLARANKAINEGKFKREITPFTLKTRKGETVIDTDEQPGNARPDKIPSLRPAFSKDGTVTAANSSSISDGAAALVLMKQSTAQAKGLKPIAKITGYTQHAHEPEWFTTAPVGAVKNLLEKTNWSASDVDLFEINEAFAVVSMAAMHDLELDHAKVNVNGGACALGHPLGASGARVLVTLIAALQNESKKTGVAALCIGGGEAVAMAVELI

SEQ ID NO: 35519 - protein, 323 aa, Saccharophagus degradans 2-40
MSTFDFIKSAQRTISMEVAAVTAMAQRIDSSFSQACEIILACQGRTVVTGIGKSGHIAKKIAASLASTGTPAFFVHPAEASHGDLGMITSNDVVIALSNSGSSSEMVALLPTLTRVGAKIISLCGKADSPLAQAANVNLDIWIESEACPLDLAPTSSTTASLVMGDALTVALLEARGFSAEDFAFRHPGGTLGRKLLLRVSDVMHAGDQVPKIHRAASLGETLSMMTAKGFGMTAVMDDSDKLVGIFTDGDLRRCVDKGINIGSAIVGDVMTPNPRTVQSRMLAAQALNLMETNKITALIVEDENQKAVGVLHMHDLLRAGLV

SEQ ID NO: 35520 - protein, 313 aa, Saccharophagus degradans 2-40
MADLMVFSGNANPELAKRVVAQLGIPLGEITVDQFSDGEISVELLENVRGRDVFVMQPTCAPTNDNLMELLVIVDALHRASAGRITAVVPYFGYARQDRRVRSARVPITAKVVADMMATVGVDRVLTVDLHAEQIQGFFDVPVDNVYGSPVLLADIEEQGFEDLVVVSPDIGGVVRARAVAKQLDIDLAIIDKRRPKANVAEVMHLIGEVENRTCLLVDDMVDTAGTLCNAAKALKERGAKKVIAYATHPVLSGPAIERLNASEMDELVITDSIPLSDAAKASPKIRQLTLSHMLAEAMRRISNEESLSAMFR

SEQ ID NO: 35521 - protein, 674 aa, Saccharophagus degradans 2-40
MKRLQPSQFHQAEKAVQKRLGVADMVAQHSEGYIRSTMPGQHRDFFTNLPMVIVSITDFDGFPWPIPLHGKPGFIKSPNANTLEIETYPTLKDVLKLNFKKSQKIGILGIELHTRRRNRMNGTIKEINNNSFLVICEQSFGNCPQYIQKRELHWVDTPQKCLQTEDIFLTNTLTSTCAEWIESSDTFFISSRTKRLSTDKRDGLDVSHRGGKPGFVKVENDTLYFPDFSGNQFFNTLGNIQSDSRVGLYFPDYESGKIILISGTAKIIWDKELTRIFEGAERIISVKVRNCLILDSFLPMRGVLTELSPSLIRTGTWENPQEKSAARVYKQFKIIKKIKESRDVTSFYIRPLDGSALSSYLPGQFLPISIKQPHTSSTCLRTYTLSQAPLSNAYRFSVKREKFGLASRILHDTINTGDSLYVSQPEGKFTLQTNKKTNVLLSAGIGITPMIAMLQGLIREVEKGEKPQDVYFIHSTQNSETHTFANELKHLNKRHKWLQLYTIYSQPKLNDKLGQHYDVSGRISLDLLRKILPTDNFDVYLCGSESFMRSSYTNLKAMGIAESRIFYEFFDDGSFESHQLNKFQTAQRAEIYFAKSNITATWTPNDGTLLQFAEKMGLKPMYSCRTGNCGTCSCTLSTGEVTYANKPGYTPANGSALICCARPALNTTKLTFHI

SEQ ID NO: 35522 - protein, 69 aa, Saccharophagus degradans 2-40
MSNRVTGTVKWFNESKGFGFIEQKSGPDVFAHFSAIASSGFKTLAEGQQVEFTVTQGQKGPQAENIVAL

SEQ ID NO: 35523 - protein, 69 aa, Saccharophagus degradans 2-40
MSNTTTGTVKWFNESKGFGFIEQKSGPDVFAHFSAIASSGFKTLAEGQQVEFTVTQGQKGPQAENIVAI

SEQ ID NO: 35524 - protein, 86 aa, Saccharophagus degradans 2-40
MVIARINFKNSPNKEEMSMSKGTVKWFNADKGFGFITPADGGKDLFVHHSEIQAGGGYATLNDGQEVEFEVGQGQKGPCANKVQPL

SEQ ID NO: 35525 - protein, 384 aa, Rhodospirillum rubrum
MKIAIPKERRPGEDRVAISPEVVKKLVGLGFEVIVEQGAGVGASITDDALTAAGATIASTAAQALSQADVVWKVQRPMTAEEGTDEVALIKEGAVLMCHLGALTNRPVVEALTKRKITAYAMELMPAISRAQSMDILSSQSNLAGYRAVIDGAYEFARAFPMMMTAAGTVPPARVLVFGVGVAGLQAIATAKRLGAVVMATDVRAATKEQVESLGGKFITVDDEAMKTAETAGGYAKEMGEEFRKKQAEAVLKELVKTDIAITTALIPGKPAPVLITEEMVTKMKPGSVIIDLAVEAGGNCPLSEPGKIVVKHGVKIVGHTNVPSRVAADASPLFAKNLLNFLTPHVDKDTKTLVMKLEDETVSGTCVTRDGAIVHPALTGQGA

SEQ ID NO: 35526 - protein, 384 aa, Rhodospirillum rubrum
MKIAIPKERRPGEDRVAISPEVVKKLVGLGFEVIVEQGAGVGASITDDALTAAGATIASTAAQALSQADVVWKVQRPMTAEEGTDEVALIKEGAVLMCHLGALTNRPVVEALTKRKITAYAMELMPRISRAQSMDILASQSNLAGYRAVIDGAYEFARAFPMMMTAAGTVPPARVLVFGVGVAGLQAIATAKRLGAVVMATDVRAATKEQVESLGGKFITVDDEAMKTAETAGGYAKEMGEEFRKKQAEAVLKELVKTDIAITTALIPGKPAPVLITEEMVTKMKPGSVIIDLAVEAGGNCPLSEPGKIVVKHGVKIVGHTNVPSRVAADASPLFAKNLLNFLTPHVDKDTKTLVMKLEDETVSGTCVTRDGAIVHPALTGQGA

SEQ ID NO: 35527 - protein, 384 aa, Rhodospirillum rubrum
MKIAIPKERRPGEDRVAISPEVVKKLVGLGFEVIVEQGAGVGASITDDALTAAGATIASTAAQALSQADVVWKVQRPMTAEEGTDEVALIKEGAVLMCHLGALTNRPVVEALTKRKITAYAMELMPRISRAQSMNILSSQSNLAGYRAVIDGAYEFARAFPMMMTAAGTVPPARVLVFGVGVAGLQAIATAKRLGAVVMATDVRAATKEQVESLGGKFITVDDEAMKTAETAGGYAKEMGEEFRKKQAEAVLKELVKTDIAITTALIPGKPAPVLITEEMVTKMKPGSVIIDLAVEAGGNCPLSEPGKIVVKHGVKIVGHTNVPSRVAADASPLFAKNLLNFLTPHVDKDTKTLVMKLEDETVSGTCVTRDGAIVHPALTGQGA

SEQ ID NO: 35528 - protein, 613 aa, Pichia pastoris
MADGVFPGAIGIDLGTTYSCVATYDSAVEIIANEQGNRVTPSFVAFTPEERLIGDAAKNQAALDPKNTVFDAKRLIGRAFDDESVQKDIKSWPFKVVNDNGNPSIEVEYLGETKQFSPQEISSVVLTKMKEVAEAKIGQKVEKAVVTVPAYFNDAQRQATKDAGAISGLNVLRIINEPTAAAIAYGLGAGKSEEEKHVLIFDLGGGTFDVSLLHIAGGVFTVKATAGDTHLGGQDFDTNLLEFFKKEFQKKTGKDISDDARALRRLRTACERAKRTLSSVAQTTVEVDSLFDGEDFTAEISRAKFEAINADLFKSTLEPVEQVLKDSKIEKSKVDDVVLVGGSTRIPKVQKLLSDFFDGKQLEKSINPDEAVAYGAAVQGAILTGQSTSEETKDLLLLDVIPLSLGVAMQGNVFAPVVPRNTTVPTIKRRTFTTVDDHQTTVQFPVYQGERVNCSENTLLGEFDLKNIPPMSAGEPVLEAIFEIDANGILKVTAVEKSTGRSANITISNSIGRLSSSEIEKMINDADKFKKADEDFANRHESKQKLEAYVSSIESTITDPILSSKLKRSAKDKIESALSDALAALELEDASGDDFRKAELALKRVVTKAMSTR

SEQ ID NO: 35529 - protein, 461 aa, Mycosphaerella graminicola
MPSLGFLKKKRTKDSTASNEVASPTSPTIGSPISQTLSRQSNLFSEQNQQSQQQPPQTSGQDSVQQNTSASQSSNAKADDPMNISPQPSAVQQQPAQPQQQYNGSQHDSAHEQNGHNPNQQHVPLLNVSKTAPTVNPLRETKGKYTLNDFQISRTLGTGSFGRVHLVQSKHNSRFYAVKVLKKAQVYKMKQVEHTNDERKMLQRCRNPFLITLWGTWQDSKNLYMVMDFIEGGELFSLLRKSQRFPNPVAKFYAAEVTIALDYLHSMNIIYRDLKPENLLLDRHGHIKITDFGFAKEVPDITWTLCGTPDYLAPEVVSSKGYNKSVDWWSLGILIFEMLAGFTPFWDSGSPLKIYENILKGRVKYPPYIHPDAQDLLSKLITADLTKRLGNLHGGSQDVMNHAWFAEVTWDRLAKKDIDAPYVPPVRGGAGDASLFDKYPEETEAYGATGDDPHRTLFPDF

SEQ ID NO: 35530 - protein, 717 aa, Oryza sativa Indica Group
MASPEWEEEEAARSPPPKRPRRDGDAPPEPQPARVGLNPADCDLDFDVGGGGLRGEALHDGGFAYCWSGARATVGVRGGGKYCFGCKVVAEQAVEMEDTAADQQHLCRVGVSRGGDPVGALGETGHSFGFGGTGKFSHQGKFVEYGVKFGVGDTVVCAVDLDSKPLASIGFSRNGEWLGIAKHFDASDKGLGLVESPVSSMQWESAIFPHVLLKNVVVEMQFSKEDGLQLVDGYEPWPSACVDGNAVSGPVFAEQKECEIMMMVGLPASGKSTWAEKWIKEHKEKRFILLGTNLALVQMKVPGLLRKNNYGERFERLMDRATMIFNTLLTRAAKIPRNYIIDQTNVYKNARSRKLRPFANYRKTAVVVFPSPSELKVRAAKRFKEMGKDVPADAVNEMTANFVLPLSKDMPDSKEPFDEVIFVELSRDEAQRNLDEMKRLLPKASTPSYANFSNQNVSSTYSGTIAGTMPSLSPGYHRQMDSPYGSGVQTPRALTHQQAAWGVQGFQSPAGINHHQVHLSSYPNTPYQHQQIQSSHPSTPYQHQAQSTSYPSTPYQDQIHSSYPSNPTQHQIHLNYPSTPNQYQSHSTYPNTPFPGHGNSAYDSNGGPGPYNPNPYSMNTDMQQRIQAPIGDRNQSYAVVSNEAYGRSGYEAANSVGRPINTHPAVYNSGSGNYMPYMQHSHDVHNSGSQYSAPVPRPPYGAPPPNYMNPQTSIWHI

SEQ ID NO: 35531 - protein, 230 aa, Edwardsiella ictaluri
MLINSGDTAFIILCTAMVCLMTPGLALFYGGLVSERNIISVMLQNFICMGVVAVIWIFGGFSLVFGQDVGGVIGNFFDYFGMLHIGVSVNKAWAPNIPFILFFAYQMMFAIITPALISGAIVGRVKFSAYVKFVFLWVIFVYIPVAHWVWGGGFLEQIGVVDFAGGIVVHVTAGFSALAAALFIGKRVDSVIKSEKPVSLPIVACGAGLLWFGWFGFRAANKTVQQSASR

SEQ ID NO: 35532 - protein, 582 aa, Arabidopsis thaliana
EFISKFSDFKNNKKLILSSAAIALLLLASIVGIAATTTNQNKNQKITTLFSTSHAILKSVCSSTLYPELCFSAVAATGGKELTSQKEVIEASLNLTTKAVKHNYFAVKKLIAKRKGLTPREVTALHDCLETIDETLDELHVAVEDLHQYPKQKSLRKHADDLKTLISSAITNQGTCLDGFSYDDADRKVRKALLKGQVHVEHMCSNALAMIKNMTETDIANFELRDKFFNLHQQQQRKLKEVTGDLDSDGWPKWLSVGDRRLLQGSTIKADATVADDGSGDFDNGSAAVAAAPEKSNKRFVIHIKAGVYRENVEVTKKKTNIMFLGDGRGKTIITGSRNVVDGSTTFHSATVAAVGERFLARDITFQNTAGPSKHQAVALRVGSDFSAFYQCDMFAYQDTLYVHSNRQFFVKCHITGTVDFIFGNAAAVLQDCDINARRPNSGQKNMVTAQGRSDPNQNTGIVIQNCRIGGTSDLLAVKGTFPTYLGRPWKEYSRTVIMQSDISDVIRPEGWHEWSGSFALDTLTYREYLNRGGGAGTANRVKWKGYKVITSDTEAQPFTAGQFIGGGGWLASTGFPFSLSL

SEQ ID NO: 35533 - protein, 413 aa, Oryza sativa Indica Group
MEEQQQVEVEVEVPSYFVCPISLQIMRDPVTLPTGITYDRDGIERWLLTAGTCPLTKQPVPPDCDPTPNHTLRRLIQSWCALHADHGVDLVPTPKPPADRARVADLVSRLRAATSSAALLDALRELRDVSAESERNRKLLAAVPGAVDVLAAVVVASCRDAKAACDEALEIVCSLELSERCLARLVERNEELVDALVATLQRTNTTSRAHAALLLEAVTAVMPSNRLVSLPEEVFGEAVQLLRDRVSSPATRAALHVLVGTTSWGRNRVKAVDAGAVAVLVDMLLDGPVERRGCELALAALDRMCGCAEGRAALVSHGAGVAVVGRKVLRVSEVASEKAVRVLRSVARHAATAAVVQEMAQTGAVEKLCVVAQSEQCGERTRERARETLRLHARAWRNSPCLQPHLQALYPSC

SEQ ID NO: 35534 - protein, 613 aa, Oryza sativa Indica Group
MAAPSQTTATTTHHRVLLPSHHHHRAVPPSLLRLPLRAARRGRLSAAAAAAAPAASTAAPSEPAAGAVPGKPTVLVAEKLGAAGLELLRGFANVDCSYGLSPEELRAKIPLCDALIVRSGTKVGRDVFEASGGRLRVVGRAGVGIDNVDLAAATEHGCLVVNAPTANTVAAAEHGIALLTAMSRNIAQADASLKAGKWQRNKYVGVSLVGKTLAILGFGKVGSEVARRAKGLGMHVIAHDPYASADRAHAIGVELVSMEDALTTADFISLHMPLTPATNKMLNDETFAKMKKGVRIINVARGGVIDEDALVRALDSGIVAQAALDVFTKEPPAPDSKLVLHENVTVTPHLGASTVEAQEGVAIEIAEAVIGALKGELAASAVNAPMVPAEVLSELAPYVVLAEKLGRLAVQLVAGGGGIKSVKVTYASARAPDDLDTRLLRAMITKGLIEPISSVFVNLVNADFTAKQRGVRITEERILLDGSPETPIDYIQVHIAHVESKFPSAISESGEITVEGKVKDGIPHLTKVGSFQVDVSLEGSLILCRQVDQPGMIGAVGSVLGEENVNVSFMSVGRIAPRKHAVMAIGVDEEPKKSTLTKIGEIPAIEEFVFLKL

SEQ ID NO: 35535 - protein, 337 aa, Oryza sativa Indica Group
MAYSRQIFVCSAMAALLFSAVVSAQLSTDFYDETCPDALDIIESAVRAAVSKESRMGASLLRLHFHDCFVNANIIQKFRVDADGSVKQVGCDGSVLLDDTAAITGEKNAKPNKNSLRGFEVVDDIKSQLEDACEQVVSCADILAVAARDSVVALGGPTWDVELGRRDGTTASLDAANNDLPPPTSDLADLIKSFSDKGLTASDMIALSGAHTIGQARCTNFRGRLYNETNLDATLATSLKPSCPNPTGGDDNTAPLDPATSYVFDNFYYRNLLRNKGLLHSDQQLFSGGSADAQTTAYATDMAGFFDDFRGAMVKMGGIGVVTGSGGQVRVNCRKVN

SEQ ID NO: 35536 - protein, 747 aa, Bacillus subtilis
MCGLAGIINLAAPRSQECTFHILKGMADAISYRGPDDEQYHIDSKVGFAFRRLSILDLVNGQQPFLNEDGSIVVMVNGEIYNYKELKASLHNHMFKTTSDCEVIVHLYEEKGIGFVDDIIGMFSIAIWDKNKNKVFLVRDRFGIKPLFYTELKHELIFASEIKSLFSHPHCPRQFNWKEALSDICLSGEAASNHKETTSFFVNIQNLDAGHYLEINLTTNERKTASYWSLQDILLRQGYRENLHPDDLIEGYRELLADSVHRCLQSDVEVGLFLSGGIDSAAVAHFAAEKQDLHTFTVLSQSTFTNEDAKYAHWLAKDLHLPNHQVLYQLGNDELLQPESYKHLLWICETPFCGPEQLYKFHLHKYAKAIRPNLKVMLTGQGSDEFNGGYSTTLSPAENPSWEGFIESVNTMEMNRLHRLQGNIFRVWEEHFGLSPINLSYLKSNDSSQADPWQSYVLTKYRDLQMYNCWHEDRIAAANHIENRVPFLDHRLVEWVCGIPDGLRKDLLWDKSVLRKSLTNELHTSYTHRPKVPFFYGKDVRYTHKMMFHLLKKNNYQLIEEAFSHSDASSIIQVEHIHAIMTYLEDDPEFTNFEFLLRLVNMGLLSKMTKETPSVQLDITSHLESITIKDWHSQEGDIASRLNISANKCEGQDILALNPGVTLLRPESDSEHCIYIAEEGFIQFIVSEEDVGAWLHILCDINGKDTLHTILDRHGVSLEEVAKYIQEAIEHNIILIKQKNLPEGAYR

SEQ ID NO: 35537 - protein, 328 aa, Hordeum vulgare
MCGGAILAQLIPPSAGRPSKQAAAGGRAPPTSSKKGGVSKSRHSSTPDADDDVFEAAFEDFDDHFDLRAEEDGGDDHVVFASKPAFSPRPAYDGGRAAHAASRKKRTGHLHGIRQRPWGKWAAEIRDPHKGTRVWLGTFDTADDAARAYDVAARRLRGSKAKVNFPDAARTGARPRRASRRTAQKPQCPPARTTAYSATAAARAQPEQDAMMVKPELMEFFNVDAIVHLTTAVAALPPVTASTFADTMPRVDEDSSVGSGGGAMLGFADELGFDPFMMFQLPCSDMYESADSIFAGDAVIPDALSVDSGMDAVSLWSFDEFPMDSAIF

SEQ ID NO: 35538 - protein, 1122 aa, Armoracia rusticana
MSGSRPSQSSEGSRRSRHSARIIAQTTVDAKLHADFEESGSSFDYSTSVRVTGPVVENQPPRSDKVTTTYLHHIQKGKLIQPFGCLLALDEKTFKVIAYSENAPELLTMASHAVPSVGEHPVLGIGTDIRSLFTAPSASALQKALGFGDVSLLNPILVHCKTSAKPFYAIVHRVTGSIIVDFEPVKPYEVPMTAAGALQSYKLAAKAITRLQSLPSGSMERLCDTMVQEVFELTGYDRVMAYKFHEDDHGEVVSEVTKPGMEPYLGLHYPATDIPQAARFLFMKNKVRMIVDCNAKHARVLQDEKLSFDLTLCGSTLRAPHSCHLQYMANMDSIASLVMAVVVNEEDGEGDAPDSTTQPQKRKRLWGLVVCHNTTPRFVPFPLRYACEFLAQVFAIHVNKEVELENQIVEKNILRTQTLLCDMLMRDAPLGIVSQSPNIMDLVKCDGAALLYKDKIWKLGTTPSEFHLQEIASWLYEYHTDSTGLSTDSLYDAGFPKALSLGDAVCGMAAVRISSKDMIFWFRSHTAGEVRWGGAKHDPDDRDDARRMHPRSSFKAFLEVVKTRSLPWKDYEMDAIHSLQLILRNAFKDGESTDVNTKFIHSKLNDLKIDGIQELEAVTSEMVRLIETATVPILAVDSDGLVNGWNTKIAELTGLPVDEAIGKHLLTLVEDSSVEIVKRMLENALEGTEEQNVQFEIKTHLSRADAGPISLVVNACASRDLHENVVGVCFVAHDLTGQKTVMDKFTRIEGDYKAIIQNPNPLIPPIFGTDEFGWCTEWNPAMSKLTGLKREEVIDKMLLGEVFGTQTACCRLKNQEAFVNLGIVLNSAVTSQESEKVSFAFFTRGGKYIECLLCVSKKLDREGVVTGVFCFLQLASHELQQALHVQRLAERTALKRLKTLAYIKRQIRNPLSGIMFTRKMMEGTELGPEQRQILQTSSLCQKQLSKVLDDSDLERIIEGCLDLEMKEFSLNEVLTASTSQVMMKSNGKSVRITNETGEEVMSDTLYGDSIRLQQVLADFMLMSVNFTPSGGQLTVTASLRKDQLGRSVHLAYLEIRLTHTGAGIPELLLNQMFGTEKDVSEEGLSLMVSRKLVKLMNGDVQYLRQAGKSSFIISAELAAANK

SEQ ID NO: 35539 - protein, 1122 aa, Armoracia rusticana
MSGSRPSQSSEGSRRSRHSARIIAQTTVDAKLHADFEESGSSFDYSTSVRVTGPVVENQPPRSDKVTTTYLHHIQKGKLIQPFGCLLALDEKTFKVIAYSENSPELLTMASHAVPSVGEHPVLGIGTDIRSLFTAPSASALQKALGFGDVSLLNPILVHCKTSAKPFYAIVHRVTGSIIVDFEPVKPYEVPMTAAGALQSYKLAAKAITRLQSLPSGSMERLCDTMVQEVFELTGYDRVMAYKFHEDDHGEVVSEVTKPGLEPYLGLHYPATDIPQAARFLFMKNKVRMIVDCNAKHARVLQDEKLSFDLTLCGSTLRAPHSCHLQYMANMDSIASHVMAVVVNEEDGEGDATDSTTQPQKRKRLWGLVVCHNTTPRFVPFPLRYACEFLAQVFAIHVNKEVELENQIVEKNILRTQTLLCDMLMRDAPLGIVSQSPNIMDLVKCDGAALLYKDKIWKLGTTPSELHLQEIASWLYEYHTDSTGLSTDSLHDAGFPKALSLGDAVCGMAAVRISLKDMIFWFRSHTAGEVRWGGAKHNPDDRDDARRMHPRSSFKAFLEVVKTRSLPWKDYEMDAIHSLQLILRNAFKDGESTDVNTNIIHSKLNDLKIDGIQELEAVTSEMVRLIETATVPILAVDSDGLVNGWNTKIAELTGLPVDEAIGKHLLTLVEDSSVEIVKRMLENALEGTEEQNVQFEIKTHQSRADAGTISLAVNACASRDLHENVVGVCFVAHDLTGQKTVMDKFTRIEGDYKAIIQNPNPLIPPIFGTDEFGWCTEWNPAMSKLTGLKREEVIDKMLLGEVFGTQKSCCRLKNQEAFVNLGIVLNGAVTSQESEKVSFAFFTRGGKYIECLLCVSKKLDREGVVTGVFCFLQLASHELQQALHVQRLAERTALKRLKAIAYIKRQIRNPLSGVMFTRKMMEGTELGPEQRQILHTSALCQEQLSKVLDDSDLESIIEGCLDLEMKEFSLNEVLTASTSQVMMKSNGKSVRITNETGEEVMSDTLYGDSIRLQQVLADFMLMSVNFTPSGGQLTVTASLRKDQLGRSVHLAYLEIRLTHTGAGIPEFLLNQMFGTEEDVSEEGLSLMVSRKLVKLMNGDVQYLRQAGKSSFIISAELAAANK

SEQ ID NO: 35540 - protein, 1122 aa, Armoracia rusticana
MSGSRPSQSSEGSRRSRHSARIIAQTTVDAKLHADFEESGSSFDYSTSVRVTGPVVENQPPRSDKVTTTYLHHIQKGKLIQPFGCLLALDEKTFKVIAYSENAPELLTMASHAVPSVGEHPVLGIGTDIRSLFTAPSASALQKALGFGDVSLLNPILVHCKTSAKPFYAIVHRVTGSIIVDFEPVKPYEVPMTAAGALQSYKLAAKAITRLQSLPSGSMERLCDTMVQEVFELTGYDRVMAYKFHEDDHGEVVSEVTKPGLEPYLGLHYPATDIPQAARFLFMKNKVRMIVDCNAKHARVLQDEKLSFDLTLCGSTLRAPHSCHLQYMANMDSIASLVMAVVVNEEDGEGDAPDSTTQPQKRKRLWGLVVCHNTTPRFVPFPLRYACEFLAQVFAIHVNKEVELENQIVEKNILRTQTLLCDMLMRDAPLGIVSQSPNIMDLVKCDGAALLYKDKIWKLGTTPSELHLQEIASWLYEYHTDSTGLSTDSLHDAGFPKALSLGDAVCGMAAVRISLKDMIFWFRSHTAGEVRWGGAKHNPDDRDDARRMHPRSSFKAFLEVVKTRSLPWKDYEMDAIHSLQLILRNAFKDGESTDVNTNIIHSKLNDLKIDGIQELEAVTSEMVRLIETATVPILAVDSDGLVNGWNTKIAELTGLPVDEAIGKHLLTLVEDSSVEIVKRMLENALEGTEEQNVQFEIKTHQSRADAGTISLAVNACASRDLHENVVGVCFVAHDLTGQKTVMDKFTRIEGDYKAIIQNPNPLIPPIFGTDEFGWCTEWNPAMSKLTGLKREEVIDKMLLGEVFGTQKSCCRLKNQEAFVNLGIVLNGAVTSQESEKVSFAFFTRGGKYIECLLCVSKKLDREGVVTGVFCFLQLASHELQQALHVQRLAERTALKRLKAIAYIKRQIRNPLSGVMFTREMIEGTELGPEQRQILHTSALCQEQLSKVLDDSDLESIIEGCLDLEMKEFSLNEVLTASTSQVMMKSNGKSVRITNETGEEVMSDTLYGDSIRLQQVLADFMLMSVNFTPSGGQLTVTASLRKDQPGRSVHLAYLEIRLTHTGAGIPEFLLNQMFGTEEDVSEEGLSLMVSRKLVKLMNGDVQYLRQAGKSSFIISAELAAANK

SEQ ID NO: 35541 - protein, 667 aa, Arabidopsis thaliana
MGSTPFCYSINPSPSKLDFTRTHVFSPVSKQFYLDLSSFSGKPGGVSGFRSRRALLGVKAATALVEKEEKREAVTDKKKKSRVLVAGGGIGGLVFALAAKKKGFDVLVFEKDLSAMRGEGKYRGPIQIQSNALAALEAIDIEVAEQVMEAGCITGDRINGLVDGISGTWYVKFDTFTPAGVTGLPVTRVISRMTLQQILARAVGEDVIRNESNVVDFEDSGDKVTVVLENGQRYEGDLLVGADGIWSKVRNNLFGRSEATYSGYTCYTGIADFIPADIESVGYRVFLGHKQYFVSSDVGGGKMQWYAFHEEPAGGADAPNGMKKRLFEIFDGWCDNVLDLLHATEEEAILRRDIYDRSPGFTWGKGRVTLLGDSIHAMQPNMGQGGCMAIEDSFQLALELDEAWKQSVETTTPVDVVSSLKRYEESRRLRVAIIHAMARMAAIMASTYKAYLGVGLGPLSFLTKFRVPHPGRVGGRFFVDIAMPSMLDWVLGGNSEKLQGRPPSCRLTDKADDRLREWFEDDDALERTIKGEWYLIPHGDDCCVSETLCLTKDEDQPCIVGSEPDQDFPGMRIVIPSSQVSKMHARVIYKDGAFFLMDLRSEHGTYVTDNEGRRYRATPNFPARFRSSDIIEFGSDKKAAFRVKVIRKTPKSTRKNESNNDKLLQTA

SEQ ID NO: 35542 - protein, 141 aa, Cathaya argyrophylla
MKALLAKYQGFHSLNSLVDVGGGTGTAIAEIVRAYPSIRGINYDLPHVVATARRLTGVEHVGGDMFEAVPTGDAIFMKWIMHDWSDENCIKILKNCRKAIPDTGKVIIVDVVLDPDQGDDIVQRKKKALDPNLGIAFDLVM

SEQ ID NO: 35543 - protein, 200 aa, Isochrysis galbana
SVRSKNTKNILLKNLLDACIGAIIWWVFGMGVAYGDSGADTGNVFIGSATTGAGAFLAAGWGSSASQYNGYTMALWFFQYVFAAAAATIVSGAVAERAQLTAYLIYTCVITGFIYPIVVHWVWCDNGFLSGAFTAKRSLTVLGGCLDFAGSGVVHMTGGVAALCAAAIIKPRIGRFDENGKPNAMPGHSSPFVVLGTFIL

SEQ ID NO: 35544 - protein, 267 aa, Isochrysis galbana
SSTGQAPGEGSEVIIKPKAIFKDPFRPGDNILVLTDTYTPAGEPLPTNTRVKAVKAFEGCESEKPWFGIEQEYTLFNLDKVTPLGWPKGGYPGPQGPYYCGAGADRSFGRFISEAHYKACLYAGISISGTNAEVMPGQWEYQVGPCEGIAGADEMMVSRYILQRVCEDFGAHVTFDPKPIQGDWNGAGCHTNFSTEKMHKEGGYAVIEQATRRLGAKHAEHIAAYGEGNERRLTGKHETASIDRFSYGVANRGCSIRIPRSTNADGY

SEQ ID NO: 35545 - protein, 328 aa, Pseudomonas putida
MELLIQPNNRLISFSPGANLLEVLRENGVAISYSCMSGRCGTCRCRVTDGSVIDSGAGSGLPNLVDEHYVLACQSVLTHNCAIEIPETDEIVTHPARIIKGTVVAVESPTHDIRRLRVRLAKPFEFSPGQYATLQFSPEHARPYSMAGLPDDQEMEFHIRKVPGGRVTEYVFEHVREGTSIKLSGPLGTAYLRQNHTGPMLCVGGGTGLAPVLSIVRGALKLGMTNPILLYFGVRSQQDLYDAERLHKLAADHPQLTVHTVIAMGPINESQRAGLVTDVIEKDIISLAGWRAYLCGAPAMVEALCTVTKHLGISPEHIYADAFYPGGI

SEQ ID NO: 35546 - protein, 372 aa, Vibrio angustum S14
MILGVPKEIKPHEYRVGMTPTAVKELTAYGHHVYIETLAGTGVGFNDQDYIDAGGFISPTAEHVFSTAEMIIKVKEPQISERKLLREGQVLFTYLHLAPDLAQAKDLIKSKAICIAYETVTDHNNKLPLLAPMSEVAGRMSIQAGAFALEKSRGGQGILLGGVPGVNAANVVIIGGGVVGSNAAQMAIGLKANVTIIDRDINVLRQLDIQFGGKINTIYATNTAIEDHVIRADLVIGGVLVAGAAAPKLVTKAMIEKMKAGSAIVDVAIDQGGCVETSHPTTHDDPTYIIDDVVHYCVANMPGAVARTSTVALNNATLPYIVALANKGFKQALLDDKHLRDGLNIYQGDITCKNVALSLHLPYIEAEKKLNE

SEQ ID NO: 35547 - protein, 639 aa, Vibrio angustum S14
MNTIQKNFKLIDKPTFFGALAMLISVVVPLILFPKEGAIWIATAKTFMTDKLGFLYLALGLAAVFFMVYIIFSDIGQIKLGDADEEPEFKTASWAAMLFCGGIGASILYWGAIEWAYYYQSPPFQLTPGSEEAVRWAATYGVFHWGPVAWAIYLVPAVPIAYFFYVRKQPVLKVSAALMPVIGEARSYGWTGKVIDVLFIFGLLGGGATTLGLAAPLITEGANYLFGTPKNTETQIFVLLICTVIFGYSAYAGMEKGIKILSNINFWGALGLLAFILAVGPTIFMLETGLDSLGRMLSNFFVMATWAEPFGGYGSFEDTHFPQDWTIFYWAWWLVFAPSMGLFIARISRGRTIKQMVAGSIFFGSMGCFLFFMVLGNFGLSLQLSGQLDVVSILNAEGATKAIFSILEQLPFSTLVITVFTLLCLIFTATTFDSISYILASVVQNDVTEEPMRWNRLFWAFAMSFMPSVLMFMGGLATLQTAAIVGGLPLLFITVMLMISAVKAATLDLSHQEGYEDPVINIEDLPDVDPWSKEGMALAKFEQLKDVAIEAADAERDALNAIWKIKKTIRAEALARGDSGADMGEVPAELAEELHRLTTEAMAAKETKLEASAQAQEARVAFNDLMKEKEQAAVTEATA

SEQ ID NO: 35548 - protein, 401 aa, Vibrio angustum S14
MARVFIVAAKRTPIGSFNGALKSVTAAELGAAAIKGALAETSVPVEAIDEVIFGNVVGAGQGMGPGRQAALKAGIPNEVPAYTLNMVCGSGMKAVMDAAAHIKAGDADIVVAAGAENMSQIPFCASSKIRDGQKMGNLELSDLLIADGLTDAFNNYHMGVTAENVVEKVGLTREQQDNFALASQQKAVAAIEQGKFVDEITPVEVVGRRATVVVDTDEYPKQDASIEGLAKLRPAFKRDGSVTAGNASGINDGGSAIIVVSEAAVNKYNLTPLAEIESYAQAGIAPEIMGLGPVPAVLKALDKAQLSIDKIERLEFNEAFAGQALGVLYEVAKETNSKVEDLVERANVNGGAIALGHPLGASGNRILVSLLHEMRRREDQYGIATLCVGGGMGTAVILKRV

SEQ ID NO: 35549 - protein, 486 aa, Vibrio angustum S14
MAPKPLFLNRSSGFYFLSWVGNIMAIKGLMQLIKKSYGVSLSALLFGALTVNASPLVLGEPEKEELKLGFIKLTDMAPLAIAYEKGYFEDEGLYVSLEAQANWKVLLDRVIDGELDGAHMLAGQPLGATIGIGTKAPIITAFSMDLNGNAITVSNEVWQQIKPQLPVDENGKVIHPIKAEALKPALEHYKDTGKPFQMGMVFPVSTHNYELRYWLAAAGINPGFYAPEKGDNSGQREAEILLNVTPPPQMPATMEAGTIQGYSVGEPWNQQAVAKKIGVPIIADNDIWKNNPEKVFGVTESWAKENPNTHIRLVKALIRAAAWLDHNGNENRAEASKILARSEYVGADEKVIANSMTGSFEYEAGDIRPAPDFNVFFRYNATYPYYSDAVWSLTQMRRWGQIPQAKPDSWYIDIAKQVYRPDIYRLAVNALISDGLMKQSDFSDVDNETGFRPPHNHFIDNIIYDGRSPNAYIEQFSIGLKGDQQI

SEQ ID NO: 35550 - protein, 270 aa, Vibrio angustum S14
MKRFFAVLITALTLLLSASHALAAEKSTLEQIKERGTLRVGLSTFVPWAMRDKQGELIGFEVDVAKRLAKDAGVKVEFIPTAWDGIIPALLAGKFDVIIGGMSITPQRNLSVLFTTPYSHSGVQLAASKELAGDKLSIADYNKRSVTLAVRRGAVTAQTAKKYFPKAKLRQFDDESQAFQEVLNGNAQAVLASTPKPEQMTLQYKDKLFLPFKERLSQGSEGFAIRQGDFNLLNFFNNWILLRTQDGWLKERYDYWFTTVDWQNQVKEGQ

SEQ ID NO: 35551 - protein, 424 aa, Vibrio angustum S14
MSKDILIVAAKRTPIGSFQGDLRHFSASQLGSIVIEAALRDVKRAQPTDTTLEHNSEMEYEHIAQLIDEVFMGCVLTAGVGQAPARQAALMAKIPVSVSCTTINKVCGSGLKSILLACDMIKAGAIRTAVAGGVESMTNAPYLLTDSRNGMRIGHKAVLDHLYLDGLQDAFDGHLMGVYGQQTATKYDISRETMDEWAIRSINKAREADNRQAFHAEIVPITAQSKKALVTVEKDQHPNEVNPKKIPNLPPLFSQHGEQGTITAASSSAIGDGAAALVLMEAEQVRRQGLDPLAIIKGYASHSRDPDEFTIAPIHAINQLLDDLNWSIDDVDLWEINEAFAVVTIAAIEQLGIDAEKVNVNGGACALGYPIGATGTRVVVTLTHALRQKVQMLSSTKIKTLKGVAAVCVGGGEALAIAIEVDVK

SEQ ID NO: 35552 - protein, 517 aa, Vibrio angustum S14
MQIGVPREVLAHETRVAATPKTVEQILKMGFSVVVEQGAGRLASFDDAAYEAAGATVVSTDEVWQSDLIFKVNAPQVNPETGVDEFELIKEGASLVSFIWPAQNPELLEKLSSKNINIMAMDSVPRISRAQALDALSSMANIAGYRAVVEAAHEFGRFFTGQITAAGKVPPAKVLVAGAGVAGLAAIGAAGSLGAIVRSFDVRPEVKEQVESMGAEFLEVDFKEDTSTGDGYAKEMSDEFNKAAERLYAEQAKDVDIIITTALIPGRPAPKLITKEMVDSMKSGSVIVDLAAANGGNCAYTEADKVVTTPNGVKVIGYTDMVGRLPTQSSQLYGTNLVNLLKLLCKEKDGNIDINFDDEVLRGLTIVKAGELTWPAPPIKVSAAAQQPKAAVKVEPKVEEPTSPVKKFGLMGAGIALFAWVANYAPAEFLAHFTVFVLACVVGYYVVWNVSHSLHTPLMSVTNAISGIIIVGALLQIGQGNGVVSFLAFIAVLIASINIFGGFTVTKRMLEMFRKDK

SEQ ID NO: 35553 - protein, 530 aa, Vibrio angustum S14
MNTSTDKVSSKYSIETTDYQVGQDNIQRWGFDIHKPVFGISAILILLFIAVMLVVDPATAKTALNNMRNGIMEQFDSYFMWAVNTFAVFCIFLMLSPLGKIRIGGKEAKPEHSTLSWSSMLFAAGIASGIMFFGVAEPTAYFTDWFGTPFNVEAMTPEAKQLAMAGSVFHWGISAWSIYAVAALALAFFAYNKNLPLSIRSLLFPIFGDRAWGWLGHAVDILAVVSTLFGLVTSLGLGAQQAASGINYVFGTHGGLGLQFGIIAFVTSIAIFSVIRGIDGGVKLLSNINIVIAFGLLVLVAILGFDVVKHSLPDTFMAYTKNFFALSNPIGRTDDTWRHGWTIFYWAWWISYAPFVGIFIARVSKGRTVRQFIFAVLFIPTLVTMTWFSVFGGIAVEQVATKVGELGLHGLQDLSLTLFYVFDAMPMSLLLSVISIVLILVFFVTSSDSASLVIDSITAGGKLDAPVPQRIFWATIEGVIAAILLWVGGAQALEALQSGVVITALPFSFILVITCVSLWKGLMSERHLYP

SEQ ID NO: 35554 - protein, 875 aa, Vibrio angustum S14
MIRIELPVLINKLNAQTKMALEQASSLCMSRENNEVTIEHLLFSILENPLSDIRVLLEQVNLKTDVVKQLCGDAMPHDKGNDTYPSFSPLLVELLQDAWLLASTEMNEAELRSGLIFLAALIRPDRYLSFSLVKAFENINREALRKEFTSLVADSAETPVVNSGETKAPLNVNSGDSALNRFCSNVTEQARQGKLDPVLCRDNEINLMIDILCRRRKNNPIVVGDAGVGKSAVIEGLASRIESGKVPEQLQNVELWLLDLGLMQAGASVKGEFEKRLKSVIDEVKNSPVKIILFIDEAHTLIGAGNQEGGGDAANLLKPALARGELCTIAATTWKEYKKYFEKDPALTRRFQLVKLDEPTTEQAVDIMRGLHCVYENAHNVLISDDALRAAAELSARYVSGRQLPDKAIDVLDTACARIAINLTAPPRRISEIESGSYQRQLEIQMINRQQLLGKAVDEERLLALVEKDLEEQVECESLYKDWQQQKELVTEIIDTRQQLLSPITDLLPEQNDDESCLSVDELQNRLVDLYSQLALIPHDELLIYPEVDAAQVAQVIADWTGVPVDQMNTDELAKITELPSILNAMIKGQDIALASIHRHLLTARADLRRPGRPQGAFLLVGPSGVGKTETVVQLAEQLYGGQQFLTTINMSEYQEKHTVSRLIGSPPGYVGFGEGGVLTESIRKMPYSIVLLDEVEKAHPEVLNLFYQAFDKGELADGEGRLIDCQNILFFLTSNLGYQTIVDYAEQPELIEEKMYPELANFFKPALLARMEVVPYLPLNKDVLAQIVRGKLSRLEKLLTSRYKAEVVIEPCLVEEILVRATRSENGARMLEAIIEGQMLPPVSLALLNKLAHREAITRICLTVENGEFYSEVE

SEQ ID NO: 35555 - protein, 568 aa, Vibrio angustum S14
MKEITVVQYLINALKAINIHHVFGVPGDFAFPINDAICEDDNIEWIGSSNELNASYAADGYARIHGVAALSTTYGPGELSALCGVAGAYSAHLPVIFITGMPSEKVMASHALIHHTLGDGQFGTFAKMADNVVEASTILTVDNAENEINRVIQLALSAKRPVYIALPEDVALSILPAPQEFNFTFEPQTGSDDVIQLAELIAYKINNATQPLIMIGEHLRVCHAQKQALRLLEKANLPFSTMFADKALLDETHPNFIGLCDGKVINKHINDYVESSDFILNLGALFTDFNTGAFTIQWPEDIVNIYQDKININKRQHPPVNFCRLLETLTPLIHPRTNTYNCYMGYSHLEPAANTENNHNDLITAHSLYPRLETFFKEDDQVIAETGTISMGLGLARLPKGARFENQTLWGSIGWATPAAFGAAIANPSCRTVLLTGEGSHQLTVQELGQFHRFGLKPIVIVLNNNGYLIERILCKDPMINYNDLCQWNYSQLPQAFGAKDWLSMKVTTNAELDHALELASTATTGVYIEVVTAMMETAALAANLASQLNPQRGLQVHVPPVQEKEFA

SEQ ID NO: 35556 - protein, 629 aa, Vibrio angustum S14
MSKIIGIDLGTTNSCVSVLDGDMPRVIENAEGERTTASVIAYTDGETLVGQPAKRQAVTNPENTLFAIKRLIGRRFEDEEIQRDLSVMPYKIIKADNGDAWVEAKGQKMAAPQVSAEVLKKMKKTAEEYLGEKVTAAVITVPAYFNDAQRQATKDAGRIAGLEVKRIINEPTAAALAYGLDKKGGDRTIAVYDLGGGTFDISIIEIDNVDGEQTFEVLATNGDTHLGGEDFDTRMINYLVDEFKKDQGIDLRNDPLAMQRVKEAAEKAKIELSSAQQTDVNLPYVTADATGPKHMNVKITRAKLESLVDELVQGTLNPVKSALKDANLNVSDITDVILVGGQTRMPLVQKTVADFFGKEPRKDVNPDEAVAMGAAIQGGVLAGDVKDVLLLDVTPLSFGIETMGGVMTSLINKNTTIPTKAEQVFSTAEDNQSAVTIHVLQGERKQAIHNKSLGQFNLEGIQAAPRGMPQIEVTFDLDADGILNVSATDKATGKAQKITIQASGGLTEAEIEKMVQEAEANKEADMQFEQLVTARNQADQLIHSTRKQLTEAGDNLPAADKESVEAAISALESVKSGDDKDAIEKHTQALMTAAQKLMEQAQANNQHQAETQNEAKSDDVVDAEFEEVK

SEQ ID NO: 35557 - protein, 69 aa, Vibrio angustum S14
MSKSTGIVKWFNEEKGFGFITQDNGGADVFVHFRAITGEGFKTLAEGQKVSFDIEQGQKGPQAANVEKA

SEQ ID NO: 35558 - protein, 610 aa, Vibrio angustum S14
MSTPLETPQLSQLNVFPVKSIAGISQSKVWVEKQGISFDRRFMVATLSGDMITARKSPKMVKVKAALIADGIVLSYEDKACLVLKYAQFDMAEASSTVWGDTFIAYTTTEQANAWFSDVLGQPVQLLFTGEQSNRLRPKISQNVSFADGYPLLVISEASLQALNERSSEHHTMDQFRTNLVVSNTEAFAEDGWKRIRIGEVEFEAVKPCARCILTTVDPKSATFSESKEPLVTMAKFRADEKGNVYFGQNLVARNEGIISVGDTIEILETKPKEIYADNSEQKLQLTCVEREDIAQDFTTFWLESHQENQALPTYLPGQHLPIQLEVNGEYISRRYTLSSSPSRPGRYAISVKRVNDGRISNWLHEHFQVGDTLVSESPSGDFHLGVHTDKLLLLSGGSGVTPMMSMLRYLSDHDLVRDVVFYHQCRTEADIPYLEELRAIEEKHPSLDLRIVLTQPKRDWQGESGRLSIGHLAMMSDLDKRQVFVCGPDAFMSSAKKLLLNMGMAASRYHQEAFGPVRHALEEKKSVELSIDGQLFQGNNQATLLEQAETAGINMDYSCRAGFCGACKVTVKSGEVEQPEVPALSSQERAEGKVLACCCVPRSDLEIIK

SEQ ID NO: 35559 - protein, 259 aa, Vibrio angustum S14
MLANWTNTHPISLICIDKWQETDDTVSIKLATKNTTITFDFKPGQFVNLGVMINGKKEFRAYSISSIPHVSYLQLTIKRVDGGAVSNFIIDHLGIGDALDILTPTGDFNCVDHPPKNKKAVLISAGCGITPVYSMAKTWLTHDSKFDVTFIHAAKSPQQTIFFNQLEQLADKYPLFSLQLLLKDKQESNYAQGRLNKEWLLNLAPDLLERSVYLCGPNQFMEDVKSYLIELGFDMTQFNSESFTPNQNNETATKQDNDI

SEQ ID NO: 35560 - protein, 310 aa, Vibrio angustum S14
MATLANYPDYSLFANAFGFLRQPLNFSPMESDADVVITGVPFDMATTGRSGSRMGPGAIRQISTNLAWEGKRWPWTFNLFKTIKVADCGDLVFDCGDAAQMCERLEAHATGILEQGKAMLSFGGDHFVTLPLLRAHAKQFGKMALIHFDAHTDTYDQGSKFDHGTMFYHAPKEGLIDPLHSVQIGIRTEHSHNLGFNVIDAGQANDWSVEQIVSMIKEKVGDMPVYLTFDIDCLDPAYAPGTGTPVCGGMTSDKALKVIRALAGINLVGMDVVEVAPSYDHADMTSLAAATIATDMLHLWALTHKKADIK

SEQ ID NO: 35561 - protein, 498 aa, Vibrio angustum S14
MIENNFAITATFVAYLLGMLAIGYIAYKRTSSSSDYFLGGRSLGPWPSAISAGASDMSGWLLLGLPGYAYLAGFESLWLAGGLLLGTWLNWLICAKRLRTYSITADNSLTLPEFLSRRFDDNSKLIQTISAFFILLFFLFYTSAGLVAGGKLFETVFGLDYTLALFIGTLCVVTYTLFGGFLAVSWTDLVQGLLMSAALLIVPIAAMNADPVQLMETLHNKNPELLTFWHDIKGQPLSFMVILSLLGWGLGYFGQPHILARFKATRSNKDISTARRIAVVWTALSMIGALLVGLTGIVYVDGNLGGELADSEKVFMLLVNAIFHPVMAGILLAAILAAIMSTADSQLLVSSSALAEDFYKQVFRPQASSNEIVMVGRIAVIALSIIAFVLALNPDSSVLGLVSYAWAGFGAAFGPVLLLSLYWSGMNRYGAIAGIVIGAVTVVVWKQLTGGMFDLYEIIPGFIFATAAVVVVSKATGRPSEAVQKQYQQYQKNLVEFD

SEQ ID NO: 35562 - protein, 603 aa, Vibrio angustum S14
MNKVLSQINIFPIKSTQKISLSQAYVKSAGIDLDRRFMIALTDGSMITSRRYPQLLLISTTIESNGLLFNYPNKPPLSLSFEQLALMTTSTAVWNDNCEAYTTSSDADLWFSEIIGQPAQLLYNGVESQRTGGKAQVKVSFADNFPVMIVSEASLNALNDRTQEVHSMDKFRANLVVSGVNAFAEDSWKRIRIGEVELEIMAPCSRCVLVNYDPSTAKKADNNEPLATLMTFRTDKVIPTNVNFGMNAIVVKEGIVRQGDQVEVLEHRTPETYPDQRVALTCVKREIIAKDFVSFSFKAQKDTALAPYLPGQYLPIRIAINGNIVERCYTLSSSPLEQEYTISVKRIEQGTVSNWLHDNLQVGDTIWSEKPSGQFYLELHKHQNTLLLSAGSGVTPMMSMLRSLISEKNTQGLTFYHYCKTQTDIPFAAELAEIQRNHPEISIHICLTQDNDTSHAYHGRICSEHFANIDIQDNYHAYVCGSSGFNQIAQELLRNQGLPTDRFHQELFNKVLTKPEQEQSLNIQYKQQQFTGNNQTSLLDQIEAAELPIKSGCRAGLCGRCKVKVAEGNVLQQDSAALSEEEKQQGVVLACCSIPTSNITIEQ

SEQ ID NO: 35563 - protein, 401 aa, Vibrio angustum S14
MSNSLVLVINSGSSSLKFALIDTVNGEATLSGLGECFGLPEAVVSWKVNGEKHEYKLDGLENHHQQSIDRIVDLVDELGLKEDIVAVGHRVVQGGNLFDRTVKIDEKVIADIESLSDLAPLHNPAHVIGMRAASKAFPTLSQYAIFDTAFHQTMPEKAYTYAISQEVSKEYNIRRYGFHGTSHYFVTREAAKVVNKPVDASSFISVHLGNGASVCVVKNGESIDTSMGFTPLAGLMMGTRCGDIDPSVLEYLLKKGWSEERLEKELINNSGFLGVSGFTSDCRGILEAMEDENHPHFHGAKLAFELFTYRVAKYIASYMVALDELDGIIFTGGIGENAMQIRSEILRLMKIFGYQEDVEGNTAARFGAQGIISKPNTPLAMVIPTNEEWVIANESMALLHA

SEQ ID NO: 35564 - protein, 291 aa, Vibrio angustum S14
MTTSIAFIGLGVMGFPMARHLFNSGFDTTVYNRTTSKAQQWASEFSGQYSETPREAAQNRDVVALCVGNDNDVRSVVFGADGVLAGMKAGSTLVDHTTTSAELAEELAKACLAQGVNFIDAPVSGGQAGAENGALTIMCGGEQAVFDSILPILNSYAKQAVLVGGYGQGQRCKMVNQICIAGVLQGLSEALTLAQKSNLDIEQVVSVLKHGAAGSWQMENRAKTMAEDKFDFGFAIDWMRKDLGFCLDEAKKHDLELPLTDAVDKRYGLLQNEGLGRMDTSVLIKAFNKTV

SEQ ID NO: 35565 - protein, 523 aa, Vibrio angustum S14
MPSNACQIADSNNTSLNSDSSRFEAKLVPILTIGFISLFIFAALADMSSFTALIQTSFESAANTFGYSWQILMLVNFLIALAIAFSPLGKKVMGTVKKPTIGTFRWLAMIMCTLLAGGGVFWSAAEPIYHFITPPPIFEGVVGSTQQAVDPALGQAFLHWGFLAWAVLGTLATIVLMYAHHEHGVKLRPRALLFPIFGKKLEEHWLGSVIDACSIIAVAAGTIGPIGFLASQLGYSLELLTGLENNVQSQLMILAVVVSIYSISAASGMDKGLQWLSRLNVIGAFGLLLAMLFLGPTKFILTEFGSAFGDYIHHFGELSLANDKPSWNVWWTWFFWGWFIGFAPMMAIFIARISEGRSIRGLVLAVAIGAPIVTNFWFAVLGGTGIFLELQTPGVISGPLNDGGLPAVLLASLSNLPLSGILLPAFLVLTTTFVVTTGDSMAYSIAMVVSGDNEPDSKHRLFWAITMGVVAAVLLLAGDGGLNALQSFIVITAVPVSILIAFTLISGPIAAYRMTCATKQVAS

SEQ ID NO: 35566 - protein, 242 aa, Vibrio angustum S14
MNKILLASIIGLVSSQAMAQDIKFAMEATYAPFEYMDENNQIQGFDVDIAKALCKEMDATCTFHNQSFDSLIPALKFKRYDAAISAMDITEARQQQVSFTQPYYDNAAGFISIKGKVTDVAALKGKRVGVQNGSTHQSYLTDQMPGVTAVPYTSYQDAFIDMKNGRIDSVFGDTAVIAEWLKKDDNLAYVGKPVTNPKYFGNGFGIAVNKGNQELVKQLNTALAKIKQDGQYQVIFDKYFGK

SEQ ID NO: 35567 - protein, 408 aa, Vibrio angustum S14
MNTTIQINELESLLIAIIVLFLGYFINSKVAILRKYNIPEPIVGGLVVAVIITIFHFHGFDISFKLSMQNALMEMFFSTVGLAASYKLLAKGGSRVFLFLALATVFIVIQNAVGVSLSKLLGLDPLLGLVVGSITLSGGHGTGAAWAHTFSTDYGINTLELSMACATFGLVMGGIIGGPVAQRLINKYNLKSDFGESGNHHIDHPDLVTYSDKEEDRITSKNTIEVLFILLVCVAGASHAKEFVDGFGINALRIPEFVYALFIGVFITNFCEGTKCYKINKETVDALGTISLSLFLAMALMSLHLWELMDLALPMLVILVVQTIVLALFTYFVTFRVMGKNYDAAIIAGGHCGFGMGATPTAVMNMGALVSRNGPSPQAFMVVPIVGAFFIDITNLLVLQGYMSFLGH

SEQ ID NO: 35568 - protein, 554 aa, Vibrio angustum S14
MSDKTVSGAELVVETLNAHNVPHIFGIPGAKVDAVFDAVCDNGPEIIICHHEQNAAFMAAATGRLTGKAGICLATSGPGASNLVTGVATANSEGDPVVALAGAVPLSMYSHNTHQSMDTRSLFTPITKFSAEVMDSSSVSDVVHKAFRIAEQPTQGASFVSLPQDILTNRIPYQPVQQPNPILFGGAHPQAIRQAADRINAAKNPVLLLGMDASQPFVADAIRQLLKQTPIAVVNTFAAAGVISHDLYNCFLGRVGLFKNQPGDIALNSADLIITIGYSPIEYDPILWNKDANTPIIHIGYQQADLEISYNPVCEVVGDLAVSVTSIASELDKRESLENNQQIQLLRHDLQHIMQMGVNKTSTNGVHPLRFVHELRRFVSDDTTVCCDVGSIYIWMARYFHSFEPRRLLFSNGQQTLGVALPWAIAASLLHPNEKVISMSGDGGFLFSSMELATAVRHKCNIVHFVWTDHSYDMVKIQQLKKYGRESAVSFIGPDIVKYAESFGAHGLAINTADDIEPVMRKAMSLSGPVLVNVNVDYSDNSRLLDQLHPCQQD

SEQ ID NO: 35569 - protein, 524 aa, Vibrio angustum S14
MSKHDKYSINNTDYTIGQDNVQKWGFDVHNAVFGVSAGLIVLFLAAILISDPGTAKATLDSVKSAIVNKFDSMFILAGNFFVVFCLGLIISPYGRIRLGGKDAEVEHSTMSWLAMLFAAGMGIGLMFWSVAEPAGYYTGSGGLTPLGVTPETPEAFKVAMGATMYHWGLHPWAIYGVVALSMAFFAYNKGLPLSIRSVFYPILGDRTWGWAGHIIDILAVLATLFGLATSLGLGAQQAASGINHIFGTHGGLGLQIGIIVGVTIITIYSVAQGIDSGVKLLSNINMLVALVLLVFVGAVGFAVSMHTIPTTIVGYVENFIPLSNPFGRTDQAWLHGWTVVYWAWWISWSPFVGSFIARISKGRTVREFLIAVLIVPTVVTTVWMSVFGGQAIHQVMDGIGSLGKNGITEVSLAMFQMFDALPLGTILSFIGICLVLVFFITSSDSGSLVIDSITAGGKVDNPVTQRVFWAVIEGLIAIALLWVGGTQAIQALQAGTISTALPFTIILLLMCVSLMLGFRTEKYK

SEQ ID NO: 35570 - protein, 112 aa, Vibrio angustum S14
METIDKIKQQIAENPILLYMKGSPKLPSCGFSSQASQALMGCGEKFAYVDILQNPDIRAELPVYAQWPTFPQLWIEGELIGGCDIILEMFQKGELQSLIKDAAARRDAASAE

SEQ ID NO: 35571 - protein, 549 aa, Vibrio angustum S14
MNNNLELKPKRKMGLVSLTMTGIGSIIGSGWLFGAYHAAKIAGPASLVSWVIGGIAVLVVALTYTEVATLFPKSGGPVRFLELTHGSIVGYMAAWATWLSIVTVIPIEAEASVQYMHSWQWEWAKPITSTIFNAQTQSLSFVGLLIAAGLMLIYFLLNYWSVSLFSKSQTSITIFKIAIPIFSVASIVAAGFHPQNFTAVNHSFAPYGWAGALTAVATAGIVFAYNGFQSPMHFAGESKNPGKDLPRAIILTLIIAVFLYLGLQAAFIGGVEPSELAIKGWSLDFSSPFAQLAIALNLNLVVMLLYVDAFVSPSGTGITYMGTTTRMLFAMSEYGHLPKSWSKLHPKYHIPRAALWVNLFVGFIFLYLFRGWGQLAGIISAATVVTYIVGPMAAMSLRKLAPDAERPVRLKALQIIAPLGFAISSEVLYWSRWPLTGKVIFILLLGFVIYAYFQNKRGWKNIKQHMKSSVWLLGYFVTMIILSFIGSDQFGGINIIPFGYDMAVVAVVSLFFFYWGVNSAWLTPKLEHELAQLEVKPEPEKELLVKHSI

SEQ ID NO: 35572 - protein, 371 aa, Vibrio angustum S14
MIIGIPKEIKTHEYRVGMIPASVKEVVSHGHRVYVETNAGTGIGFSDQDYIDAGAQILATASDVFAEAEMIVKVKEPQAVERAMLREGQILFTYLHLAPDPEQTHDLINSKAVCIAYETVTDKNGRLPLLAPMSEVAGRMSIQAGAFALEKSRGGCGMLLGGVPGVEPAKVVIIGGGVVGANAAQMALGLQADVTVIDRNIDVLRQLDAQFNGQLKTVYSTNDSIEKHVLEADLVIGGVLVVGAAAPKLVTAEMIKKMKPGAAIVDVAIDQGGCVETSHATTHSEPTYIVDDVVHYCVANMPGAVARTSAVALNNVTLPYIVNLANKGYKKALQDDKHLLNGLNVYRGQITCESVAESLDLPYVDADSAIA

SEQ ID NO: 35573 - protein, 404 aa, Vibrio angustum S14
MQKFGMSSKLNNVCYDIRGPVLKHAKRMEEEGQKILKLNIGNPAPFGFDAPDEILVDVIRNLPTSQGYCDSKGIYSARKAVVQHYQKRGLLDLDVEDVYIGNGVSELIVMAMQALLNHKDEILVPSPDYPLWTAAVSLSGGTPVHYTCDEQSDWYPDLDDIKKKITPNTRGIVLINPNNPTGAVYSRDFLIEVVEIARQHDLIIFADEIYDKILYDGAQHTSIAPLAEDVVCVTFNGLSKSYRVCGFRAGWMIISGPRHRAKGYIEGLEMLSSMRLCANVPMQHAIQTALGGYQSINELILPGGRLLEQRNKAYDLLTQIPGVSCVKPKGALYLFPKLDQKKFNIQDDQKMAMDFLLQEKVLVVHGTGFNWKQPDHFRIVTLPHVDDLELAMGRLERFLHSYRQ

SEQ ID NO: 35574 - protein, 288 aa, Vibrio angustum S14
MENNPFDSLMPPAMAHKAEEVGVYKATKHPLQSFFLAITAGVFISIAFVFYTTVTTGAGDMPWGMAKFVGALAFSLGLILVVICGGELFTSSVLTTVARASNRITTGQLLRNWVVVYAGNFIGASFFVICIWIAKQHLGDNGQWGITAMKIAQHKLHHTFGQAVVLGMLCNLMVCLAVWMTFSCRSATDKIMVMLLPVAMFVACGFEHSIANMFMIPMGIVIQNFASPEFWTMTGVDPSQFADLTVKHFVMNNLIPVTIGNIIGGGFLVGLTYWVIHRRSELKGNKKH

SEQ ID NO: 35575 - protein, 424 aa, Vibrio angustum S14
MMSDEINVLIVDDDQDVLDAYQELLELSGYNVATVQDSTKVINMLNHNWSGVIVTDMYMPGLDGMELLEKIQDFDNEIPVIIVTGHGDIPMAVDALKKGAIDFLQKPLQPKELIKLLEKHLPQRKKIIEQRKTLHNTATELLLGESPLIVKIREQLKQVVNSTKDALIEGENGTGRHTVAKILHKNSPLHQGPFIEIDGSSITCTPDLQRSMISARSGCLCLSNPHIMPIESQQWLCRFLLEQERQGKKEVRLLALFTGSPEPSVESEQFLPELFYFLSQVRFSLPTLRQRSSDITFIFKHYLKQSCKKLNKALPAIDKAYINTLCRYEWPGNVLELKNVAELYAIGIVKLAGQERSKPLEQMSSPLDDLVDGYEKQVIEDALYLFAGRINEVSSYLQIPRKKLYLRMKKHGLDKAEYKVRPSH

SEQ ID NO: 35576 - protein, 398 aa, Vibrio angustum S14
MSKLVLVLNCGSSSLKFAIIDPVSGDEHLSGLAECLGLPEARIKWKLDGKHEAQLGEGAAHEEALAFMVDTILASKPELKENLGAIGHRIVHGGEQFSASALIDDVVLQGIVDASDFAPLHNPAHVVGIEAAKHNFADLKNVAVFDTAFHQTMPEEAFLYAIPYNLYKENGIRRYGAHGTSHRFIARETAKLLDKPLDELNIINCHLGNGASVCAIKGGKSVDISMGLTPLEGLVMGTRCGDLDPAVMFHLHDRLGMSVAEINTMFTKESGLLGLTGVTSDCRFVEENYGTKEEATRAMNVFCHRLAKYVASYAANMDGRLDAIVFTGGIGENSAPIREEVLKRLSIFGIEVDSEANLKARFGNEGVITSANSRIPAMVVSTNEELVIAEDTALLAEI

SEQ ID NO: 35577 - protein, 710 aa, Vibrio angustum S14
MLVPVGAGVGLTSVSLGVLRAMERKGVRVSFFKPIAQPRKGGDQPDLTTTIISANSDMKIAESFSMASAEELIRNDKTDVLLEDIVARFKAATADADVTLIEGLVATRKHPFANQINFEIAKTLDAEIVFVVSPGTDNPAQLKERIEVACSNFGGIKNKQISGVIVNKLNAPVDAEGRTRPDLSEIFDDAEGTVPSNVEIMQVFNSSPIRVLGCAPWSAELIATRATDIAQHLNAEIINAGDIETRRIKSITFCARSIPNMVEHFRPGSLLVTSADRPDVIVAACLAAMNGVELGALLLTGGYDLPKPVMDLCERAFATGLPVMTAQGNTWQTSLNLQSFTLEVPADDKERVELVNEYMASHIDGNWIESLTEGSNRERRLSPPAFRYQLTELARKAAKRIVLPEGDEPRTVKAAAICAERGIAECVLLGNPDEIRRVAEQQGVVLGTGVTIINSDEVRENYVARLVELRGAKGMTDVVAREKLQDSVFLGTMMLENDEVDGLVSGAVHTTANTIVPPFQIIKTAPDASIVSSVFFMLLPDQVLVYGDCAINPDPTAEQLAEIAIQSADSAKAFGIDPRVAMISYSTGESGKGADVDKVREATKIAQEKRPDLVIDGPLQYDAAIMENVAASKAPNSPVAGKATVFVFPDLNTGNTTYKAVQRSADLVSIGPMLQGMRKPVNDLSRGALVDDIVYTVALTAIQAEQAAAK

SEQ ID NO: 35578 - protein, 500 aa, Vibrio angustum S14
MIPVVALVGRPNVGKSTLFNRLTRTRDALVADFPGLTRDRKYGRAELEEHEFIVIDTGGIDGTEEGVETKMAEQSLAAIEEADVVLFLVDGRAGLTAADEAIAKHLRSREKPTFLVVNKVDGIDADSACAEFWRLGVDAMYQIAATQNRGVTALMERALAPFSDKLNAELAENGEEQEVSIEDLTSVEDIEKANLSEADAEAAYKRLQEQPIKLAIIGRPNVGKSTLTNRILGEERVVVYDMPGTTRDSIYIPMERDGQEYVLIDTAGIRRRKNMHQAVEKFSVIQTLKAVEDANVVLLVIDARENISDQDLSLLGFALNAGRSLVIAVNKWDGLDNEVKERVKSELDRRLGFVDFARIHFISALHGTGVGHLYESVIEAYQSATKRISTSLLTRIMQMAQDDHQPPMIRGRRVKLKYAHAGGYNPPIIVVHGNQVNDLPGSYKRYLMNYYRKSLEMMGTPIRIQFQNSENPFETKKQKLTVSQERQRKRLTSALRDRKK

SEQ ID NO: 35579 - protein, 404 aa, Vibrio angustum S14
MKLPIYFDYSATCPVDPRVAEKMMQCLTTEGNFGNPASRSHRYGWQAEEAVDTAREHIAELVNADPREIVFTSGATESDNLAIKGAAHFYSKKGKHVITCKTEHKAVLDPCRQLEREGFEVTYLEPESNGLIDLAKLRDSMREDTVLVSIMHVNNEIGVVQDIAAIGELCRENKTVFHVDAAQSAGKLPIDVQAMKVDLISFSAHKIYGPKGIGALYVRRKPRIRLEAQMHGGGHERGFRSGTLPTHQIVGMGEAFRIAKEEMDQDYQHALKLRDRLLMRLEGIEEMSINGDLEQRVPHNLNISFAFVEGESLLMALKDLAVSSGSACTSASLEPSYVLRALGLNDELAHSSIRFSFGRFTTEEEIDYAAAQIKGAVDKLREMSPLWDMHKEGIDLNTVEWAHH

SEQ ID NO: 35580 - protein, 202 aa, Vibrio angustum S14
MVGQQHILSRFLLAPSQQYDQNHQDRIRHHWEDSYLFKQAAVLIPLVHRENGFNVVLTRRAKHLKHHPGQIAFPGGRFEPTDEDLIATAIRETFEETNITCYRNDVHGCLSTLPTMSGYMVTPFIATIGSDYTPIADPNEVDCIFEAPLNHLLNPKNIRQYKFLLNGNNHSVYNIPFEDYSIWGATAQMIKLLSDQIWHDDL

SEQ ID NO: 35581 - protein, 585 aa, Vibrio angustum S14
MTQLTEKSSSETYKRLWPYISIYKAGLAVAIIALIINAVGDTLMLSMIKPLLDESFGGLDKIDSDFLAMMPIYLIGLMILRGVSGFVSTYCLSWVSGNVVMSLRRQLFQHFMKMPVAFFDKESSGALLSRITYDSEQVASATSSALVSIVREGASIIGLMALMFWNSWQLSAILIVIAPVVAISIRIVSKRFRKISRDMQDAMGSVTSSAEQMLKGHKVVLSYGGQQVEKERFDNVSNQMRRQTMKLVSAQAIANPVIQIIASVALVVVLILANTPSLRAELTPGTFAVVFGAMFGLMRPLKALTNVTSQFQRGMAACHTLFELMDLETENDNGKVEVKRVKGDVEVKNVTFTYPTKDTPALRNVSFTLPAGKTLALVGRSGSGKSTIANLLTRFYDIDSGEINLDGAEIRDYKLSNLRAQVAVVSQNVHLFNDTIANNIAYASDDAYSREDIERAAELAYAMDFIKGMDNGLDTIIGENGVSLSGGQRQRLAIARALLRDAPVLILDEATSALDTESERAIQSALDELQKDRTVLVIAHRLSTIENADQILVVDDGEIVERGTHSELISHDGAYAQLHRIQFGD

SEQ ID NO: 35582 - protein, 586 aa, Vibrio angustum S14
MSKNNNKRLSILLKLNTYITPYKWRVVAALAALLTTASLTLSIGYGVRILIDQGFAQQSLTDLRHAIQFIIGVTICIAIGTYFRFYLVSSVGERVSADIRLAVFNHVISLHPSYFETNSSGDIMSRLTTDTTLLQSIIGSSFSMAMRSALLCLGAIIMLFATNFKLTFIVLISVPFVLIPILFFGRRVRALSRKSQDTMADIGSYAGEAIEHIKTVQSFSAEQYEKKAFADEVEKAYDVGRQRVKQRAILIAGVIAIVFSAIAGMLYVGGSDVIKGEMSAGDLGAFVFYAIMVASSMANISEVLGELQRAAGATERLIEILQVKSDICTPDHHESIDCSHPSDIRFSNVSFHYPSRLNHPAINQLNLVAEQGKVLALVGPSGAGKTTLFELLQRFYDPQQGQVLVGNKDIRQFAPNELRQHMALVPQQPALFSNDVFHNIRYGTPDATDEEVIEAAKKAHAHEFIEKLPNGYHSFLGERGVRLSGGQKQRIAIARAILKNPKILLLDEATSALDSESEHYVQQALEELMKDRTTLIIAHRLSTIQHADKIAVLEGGELIDEGDHESLLKSCELYQRLVHLQFKHLE

SEQ ID NO: 35583 - protein, 459 aa, Vibrio angustum S14
MNQTRVLVVEDDEGLREALVDTLALAGYQWIEAESAEHALVIMKSETVDIVVSDVQMAGMDGLALLRSIKLNWPKIPVLLMTAYANIEDAVAAMREGAIDYMAKPFAPEVLLNMVGRYAPIKKQSSKTVVADPKSIKLLALADKVAKTEANVMVLGPSGSGKEVLSRYIHDNSERKDGPFIAINCAAIPENMLEATLFGYEKGAFTGAIQACPGKFEQAQGGTLLLDEISEMDLGLQAKLLRVLQEREVERLGGRKSIKLDVRILATSNRELKTYVAEGHFREDLYYRLNVFPIAWPALAERQGDILPLATLFAERHSIKQGNVVPSISQAAQDKLVQYPWPGNVRELDNVIQRALILCDNNHIQQQDILLEHFDWLDTEMPQSVPEPEPCVVAVRPKPTATGEGLGSELREQEFSIILDTLIACEGSRKDVAEQLGISPRTLRYKLAKMRDAGIEIPA

SEQ ID NO: 35584 - protein, 556 aa, Vibrio angustum S14
MCSVFGILDIKSDAAALRPIALEMSKKLRHRGPDWSGIYASEHAILAHERLAIVGLNSGAQPLYSPDKKLILAVNGEIYNHKEIRARYEGKYDFQTDSDCEVILALYQDMGEELLEELNGIFAFVLYDEEKDTYLVGRDHIGIIPLYQGFDENGNYYVASEMKALVPVCKTVSEFPPGCYYGSADAEPQRYYTRDWNEYAAVQGNSTSKEELTEALEAAIKRQLMTDVPYGVLLSGGLDSSITSAVAKRFAAMRIEDNDQSEAWWPQLHSFAVGLEGAPDLKAAREVADKIGTVHHEMTYTIQEGLDAIRDVIYHIETYDVTTIRASTPMFLMGRKIKAMGIKMVLSGEGADEIFGGYLYFHKAPNAKEFHEETVRKLLALNMFDCARANKSLAAWGVEGRVPFLDKEFIDVAMRLNPEDKMCGNGKMEKHILRECFEHYLPESIAWRQKEQFSDGVGYSWIDTLKEVAEEKVTDQQLETAAYRFPYNTPTTKEAYAYREIFEELFPLESAAKCVPGGPSIACSSAKAIEWDESFKNAADPSGRAIAAVHNEAYKK

SEQ ID NO: 35585 - protein, 554 aa, Vibrio angustum S14
MSESEARPTNFIRQIIDADLASGKHTSVHTRFPPEPNGYLHIGHAKSICLNFGIAQDYQGQCNLRFDDTNPEKEDIEYVESIKNDVNWLGFEWSGEICYSSNYFDKLYGFAIELINKGLAYVDELSPEQMREYRGTLTEPGKHSPYRDRSVEENLALFDKMKNGEVEEGKMCLRAKIDMASPFMVMRDPVIYRVRFATHHQTGDKWCIYPMYDFTHCISDALEGITHSICTLEFMDNRRLYDWVLENITIDCTPHQYEFSRLNLEYTVMSKRKLNQLVTDKLVNGWDDPRMPTISGLRRRGFTPASMREFCKRIGVTKQDNTIEISSLESCIRDDLNENAPRAMAVLDPVKVVIENFDGETEMLTVANHPNKPEMGSREVPFSRELYIEREDFREEANKKYKRLVLGKEVRLRGAYVIQADRIEKDAEGNITTIFCSYDKDTLGKNPADGRKVKGVIHWVSAEAGIPAEIRLYDRLFTVPNPGAADDFVSVINPDSLTVVNGFVEPSLVAAEAEKAYQFERMGYFCADNKDSSPEHLVFNRTVGLRDTWAKIGD

SEQ ID NO: 35586 - protein, 356 aa, Vibrio angustum S14
MSKEKILFIDRDGTLIVEPPVDFQVDRLDKLKFEPNVIPALLALQNAGYKLVMVTNQDGLGTDSYPQADFDAPHNMMMEIFESQGVIFSDVLICPHFDNEGCSCRKPKLGLVKEYLQQGRVDFETSAVIGDRITDLQLAENMAIRGIQYNPEIMNWMQILTDLTTQPRIAEVVRTTKETDIRVKVNLDQTGGNTISTGLGFFDHMLDQIATHGGFQMTLTVDGDLHIDDHHSVEDAALALGEALKKALGDKRGIGRFGFSLPMDECLAQCALDLSGRPYLKFDAQFSRDQVGDLSTEMVPHFFRSLTDTLACTLHLSSTGNNDHHIVESLFKAFGRTLRQAIKVEGNELPSSKGVL

SEQ ID NO: 35587 - protein, 456 aa, Vibrio angustum S14
MDKATTHSESLTVAKFGGTSVADYAAMSRSAAIVTANPETKIVLISACSGVTNILVELANGVSDSTTRQQRIQTLTQTHQDVLDQLQHPENVQDAIYGLLDNIATLAEHAAFATSAQLTDQIVSHGELLSTHLFSQILVELNAPAVRVDIRPIMRTDDQFGKAIPQPDTIKQLATEQLLPLLDNNIVVSQGFIGSNSQGVTTTLGRGGSDYSAALIAEAVNASTLEIWTDVPGLYTTDPRITSAAKPIKEISFSEASEMANFGAKILHPSTLVPAVRQQIPVFVGSSKAPEQGGTWIRQSVEEAPLFRALALRANQTMVTLTSLNMFHAYGFLAEVFRILAEHKISVDLITTSEVSVSLTLDQTDTGGGAPTLPLQVVEELSQLCVVDVEQGLSLVALIGNQMSDTKGSAKDIFGALEDHNLRMICYGASPHNLCFLINEDEAKDVVRTLHASLLE

SEQ ID NO: 35588 - protein, 323 aa, Vibrio angustum S14
MSRSFDFCSHGKKVLDIEIQALQNISQYIDDSFNKACQLVLDCQGKVIVMGMGKSGHIGRKLAATLASTGTPAFFVHPGEASHGDLGMIKQEDVVIAISNSGEASEILALLPVIKRLGIPMISMTGKPMSSMAKMAVINLQITVEKEACPLNLAPTSSTTATLVMGDALAISVMEARGFTADDFALSHPGGALGRKLLMRIADVMHTGKMLPIIEETASIKDALLEISKKGLGMTAIVNNKQQLSGIFTDGDLRRLLDNHVDIHNTSIGDVMSCNPQTISPQLLAAEGLKIMEDRKINGLLVTENAQLVGALNMHDLLKAGVM

SEQ ID NO: 35589 - protein, 409 aa, Vibrio angustum S14
MELSTTVIELRYALDTFFFLISGALVMWMAAGFAMLEAGLVRSKNTTEILTKNICLYAIACTMYLLVGYNIMYVDNSAGGWLPSFGALIGTQAEGADHSLESDFFFQVVFVATAMSVVSGAVAERMKLWSFLIFSVVLTAVIYPVEGYWTWGGGFLSEAGFSDFAGSGIVHMAGAAAALAGVILLGARKGKYGKNGEIYPIPGSNMPLATLGTFILWFGWFGFNGGSQLMVSDFENATAVGQIFLNTNAAAAAGAIAALAVCKTTWGKADLTMVLNGALAGLVAITADPLSPSPVAAVIIGVVAGALVVFSIIALDKVKIDDPVGAISVHGVCGLFGLMVVPFSNADASFMTQLFGAAVIFGWVFAASLAVWGVLKATIGIRVTEEEELEGMDSHDCGVDAYPEFVSVK

SEQ ID NO: 35590 - protein, 858 aa, Vibrio angustum S14
MRLDRFTSKFQSAISDAQSLALGRDHQYIEPAHLMVALLNQDGSTVRPLLTLLNIDITQLRSRLAELLDRMPKVTGIGGEVQLSHGMGVLLNMCDKLAQKRKDKFISSELFILAAAEDKGPLGELFKELGLTAKNIEQAIDQIRGGQKVDDPNAEENRQALEKYTIDLTERAEQGKLDPVIGRDDEIRRTIQVLQRRTKNNPVIIGEPGVGKTAIVEGLAQRIVNGEVPEGLRDKRVLSLDMGSLIAGAKFRGEFEERLKAVLNELSQEDGRVILFIDEIHTMVGAGKGEGSMDAGNMLKPALARGELHCVGATTLDEYRQYIEKDAALERRFQKVLVDEPSVEDTIAILRGLKERYELHHHVEITDPAIVAAATLSHRYISDRQLPDKAIDLIDEAASSIRMQIDSKPESLDRLERRIIQLKIEQQALEKEDDAASNKHLSDLLEELDLKEREYAELEEVWNAEKAALSGTQHIKAELEQARTDVEIARRAGDLNRMSELQYGRIPELEKQLDLAAQAEMQEMTLLKNKVTDTEIADVLSKATGIPVSKMLEGERDKLLRMEDELHHRVIGQDEAVVAVANAIRRSRAGLADPQRPIGSFLFLGPTGVGKTELCKSLANFMFDSEEAMVRIDMSEFMEKHSVARLVGAPPGYVGYEEGGYLTEAVRRRPYSVVLLDEVEKAHPDVFNILLQVLDDGRLTDGQGRTVDFRNTVIIMTSNLGSDRIQEHFGNLDYEGIKALVMEVVGQHFRPEFINRVDETVVFHPLGKENIKNIASIQLERLKKRLAEKDFRLDVGDSALDMIAEAGFDPVYGARPLKRAIQQYIENPLAQDLLSGKFVPGKVITLSVKDDVIVAEQI

SEQ ID NO: 35591 - protein, 70 aa, Vibrio angustum S14
MSNKNTGLVKWFNEDKGFGFITQDNGGADVFVHFQAIVSEGFKTLMDGQKVSFDVEQGQKGLQASNVVAL

SEQ ID NO: 35592 - protein, 572 aa, Vibrio angustum S14
MEMLSGADMIVRSMIDQGVKHIFGYPGGSVLDIYDALHEKSDIEHVLVRHEQAAVHMADGYARATGDVGVVLVTSGPGATNAITGIATAYMDSIPMVVLSGQVMSSLIGNDAFQECDMVGISRPVVKHSFLVTKPEDIPAIIKKAFYIASTGRPGPVVVDIPKDMLNPAEAYPYQYPESISLRSYNPTTQGHKGQIKRGVKALLSAKKPVLYVGGGAIMSSCSEQLIELAESLNIPVVNTLMGLGAFPGTHKQCLGMLGMHGTYEANMAMHNADLIFGIGVRFDDRTTNNLEKYCPDATIMHIDIDPSSISKTVSADIPIVGSADTVLNSMLKLLKEHEVKNDQQEIAQWWQSIESWRERECLSYDTDSDRIKPQQVIEVLHRLTNGEAYVSSDVGQHQMFAALYYPFDKPRRWINSGGLGTMGFGLPAAMGVKFALPDAEVVCVTGDGSIQMNIQELSTALQYDIPVKIINLNNRFLGMVKQWQDMIYQGRHSHSYMDSVPDFAAIAEAYGHVGVRISDPNKLESELEKALALKDKLVFIDISVDETEHVYPMLIRGGAMNEMWLSKTERT

SEQ ID NO: 35593 - protein, 389 aa, Vibrio angustum S14
MKFIDEAVIKVDAGDGGNGVVSFRTEKYIPKGGPDGGDGGDGGDVYLFADENFNTLIDYRFERFHAAERGENGRGGNCTGKRGADKILTVPVGTRAVDDDTGEVIADLTEHGMKVMVAKGGFHGLGNTRFKSSVNRAPRQKTMGSLGEVRHLRLELLLLADVGMLGLPNAGKSTFIRSVSAAKPKVADYPFTTLVPSLGVVRVDAERNFVVADIPGLIEGAADGAGLGIRFLKHLERCRVLLHMIDLLPADGSDPVENAFTIINELEQYSDKLGNKPRWIVFNKADLLDEEEAQEKMTEVLEALAWEDKYYSISALNRTGTKELTYDLMEAIDAMPKIKYEPEEKEDKVDFKWDDYHAEQIKKAQDEDDDDDWDDWNEDDYDVEIIYKP

SEQ ID NO: 35594 - protein, 285 aa, Vibrio angustum S14
MKKHRAFLKWAGGKYSLVEDIKRHLPPARKLVEPFVGAGSVFLNTDYDHYLLADINPDLINLYNILKHEPERYIEDARKLFTPEYNNKEAYLKIREEFNASDDPYLRSLYFLYMNRHGFNGLCRYNKKGGFNVPFGSYKKPYFPEAEMYYFSEKAKRATFVCEGYLQTFSRARKGCVVYCDPPYAPLSSTANFTSYSGNGFSLDDQATLADVAEKAAAERDIAVLISNHDTALTRRLYTGADLSVVKAKRTISRNGSGRNKVDELLALFSVSSTEPAPAFSSEEE

SEQ ID NO: 35595 - protein, 402 aa, Vibrio angustum S14
MSKINKVVLAYSGGLDTSAIIPWLKENYDCEVVAFVADVGQGEEELVGIEEKALASGASSCYIADLKEDMVKDYIYPSLKTGAVYEGKYLLGTSMARPIIAKAQVECALEVGADALCHGCTGKGNDQVRFEGAFAALAPQLKVIAPWREWDLRSREALLDYLAERDIPCTASLEKIYSRDANAWHVSTEGGVLEDTWNAPNDLCWVWTKDPEQAPDQAETVTLKIEQGEVVAVDGEAMTPYNVLTYLNEKGIEHGVGRIDIVENRLVGMKSRGCYETPGGTIMMEALRAVEQLVLDKESFDFRQTLGLKASHLIYDGRWFTPLCQSLIAAADELAKDVSGEVVVKLYKGQATVIQKRSTNSLYSEEFATFGEDDVYDHSHAGGFIRLYSLASRIRALNSQKK

SEQ ID NO: 35596 - protein, 804 aa, Vibrio angustum S14
MTKALRQLHKFGGSSLADPECYRRVADILAEYSNNEDLIVVSAAGKTTNQLILWLAQLEKDGRQAHETLLSVRSYQQQLIGSLLYSPTAERLIELLHDDLSTIARYGESPISPALRGTIQGYGEVWSARLLAALLCQRDLPATDLDSRLFLRAEHAAQPEVDSRSSKPLLQQQFAQHSHHRLVITGFMAQNEQGETVLLGRNGSDYSATIIGALADVSRVTIWSDVAGVYSADPRKVSDACLLPLLRLDEANELARLAAPVLHSRTLQPVAQSAIDLTLRCSHQPESGSTRVERVLASGRGAKIVSSLDDVCLIEVDVPRGMDVQHVREDVERLLSRHQLAPLAQSLEQSKGRIMLAYTREVVNDVLKLLQDSGTPAELRLREGFSMVAAVGAGVINNPIHCHGFYQQLKGLPVEFMTEADSGLSLVAVLRHVETEGLVSDIHQALFQAQKRVGLVLCGKGNIGSRWLELFEREKPALEKRHGLSFTLIGILDSRRCWMNFTGIKPSLALTQFEQEAIEYQESAFFSHFANADYDDVIVLDVTASSELSKRYAEIAEHGLHLISANKVAGSASSKDYHAVIDAFAKSSRHWLYNATVGAGLPVNHTVRDLRESGDQIIAVSGIFSGTLSWLFQQYDGSVPFSALVEQAWQQGLTEPDPRHDLDGSDVMRKLVILARESGLDIEPEQVKVESLVPSDLAALSVEQFFEQTQVLDEILAERLESAREEEKVLRYVARLDRHGNAYVGVEALPQEHALANLLPCDNIFAIESHWYRDNPLVIRGPGAGRDVTAGALLSDINRLACLL

SEQ ID NO: 35597 - protein, 184 aa, Vibrio angustum S14
MAKPAVFIDRDGVINVDHGYVHTVDDFEYIEGVFEACKKFKEMGYLLVLVTNQSGIARGMFSEDEFTSLTEWMDWNFVDNGVEFDGIYYCPHHATKGQGDYLQDCDCRKPKPGMFISARDFLKIDMSQSVMIGDKADDMKAATAADVALKVLVRTGKPITEEGEALANVVLDSIADVPAWLAIQ

SEQ ID NO: 35598 - protein, 485 aa, Vibrio angustum S14
MNSQLIIPIVLYLAAVFAMALYTRRFQSKGNFLTEYLVGGRSMGGFVLAMTLAATYASASTFIGGPGAAYKMGLGWVLLAMIQLPAAWLTLGVLGKKFAIEARRHNALTLNDILYARYKNRGVVIFASLSLLIAFFGTMVVQFVGGARLLQTVTGLSYMHGLMIFAITVGLYTTIGGFRAVVMTDTLQGLMMIIGTIALLVGIVHAGGSIGALVTKLHDIDPALITPYGPNHFLSQPFMLSFWILVCFGVIGLPHAAVRCMSYKDSNSLHKGMVFSTIMVALLMFGMHLAGALGRAIVPDIASPDQIMPTLMVTVLPPVVAGVFLAGPMAAIMSTIDSQLIQASATLLKDLYINYINPSIANNEHAEKRLPKLSLWVTGIFSGLVFIAAMNPPDMIIWLNLLAFGSLQAVFLWPLVLGLYWKKASATGAFASMIVGLSSYIILSFSKPDMNGVHAIVPTLLLGLIAFVIGSYAKPTKVETPQLSD

SEQ ID NO: 35599 - protein, 70 aa, Vibrio angustum S14
MSNKTTGLVKWFNEEKGFGFITQDNGGADVFVHFRAIASEGFKTLAEGQKVSFEVEQGQKGLQAANVVAL

SEQ ID NO: 35600 - protein, 400 aa, Vibrio angustum S14
MLSQKTIDIVKTTAPVIAEAGPMVTQHFYQRMFSHNPELKDVFNMSHQKNGANNEPSSQQEALFNAICAYANNIENLAVLLPAVEKIAHKHTSFMITAEQYNIVGSHLIATIDELLAPGQDVLDAWAEAYGLLANIFINREEEIYQENANKVGGWRGTREFVVTNKQQDSEFITSFTFKPTDGGKVASYKPGQYLGIYLNADELENQEIRQYSLSSAPQDDQYRISVKRESHGKVSNYLHNNINIGDKVMLAAPAGDFFLDVEANTPVTLLSAGVGLTPTLSMLESLTEHQAPVNWLHATENGAHHAYKKQVKALAQQHNHIQDITWYNAPLDSDLPAEDYDYQGLMDLSTIAPQLTDENMHFYFCGPVAFMQYIAKQLLALGVSEDRIHYECFGPHKVL

SEQ ID NO: 35601 - protein, 70 aa, Vibrio angustum S14
MSNKTLGLVKWFNEEKGFGFLTQDNGGADVFVHFRAIASEGFKTLAEGQKVSFDVEQGQKGLQAVNVIGL

SEQ ID NO: 35602 - protein, 70 aa, Vibrio angustum S14
MSNKTLGLVKWFNEEKGFGFLTQDNGGADVFVHFRAIASEGFKTLTEGQKVSFDVEQGQKGLQAANVVGL

SEQ ID NO: 35603 - protein, 637 aa, Vibrio angustum S14
MGKIIGIDLGTTNSCVAVLDGDKPRVIENAEGERTTASIVAYTQDGETLVGQPAKRQAVTNPENTLFAIKRLIGRRFEDEEVQRDIEIMPYKIVKADNGDAWVEAKGQKMAAPQVSAEILKKMKKTAEDYLGEPVTGAVITVPAYFNDAQRQATKDAGRIAGLDVKRIINEPTAAALAYGLDKQGGDRTIAVYDLGGGTFDISIIEIDEVEGEKTFEVLATNGDTHLGGEDFDTRLINYLVEEFKKEQGIDLKNDPLAMQRLKEAAEKAKIELSSAQQTDVNLPYITADATGPKHMNIKVTRAKLESLVEDLVQRSLDPLKVALADADLTVGDITDVILVGGQTRMPMVQAKVTEFFGKEPRKDVNPDEAVAVGAAVQGGVLAGDVKDVLLLDVTPLSLGIETMGGVMTKLIEKNTTIPTKANQVFSTAEDNQSAVTIHVIQGERKQASFNKSLGQFNLEGIQPAPRGMPQIEVTFDLDADGILNVSAKDKTTGKEQKITIQASGGLSDADIEKMVQEAEANKENDKKFEELVTARNQADQLIHGTRKQIEEAGDALPADEKAKIEAAVAELEEARKGEDKEAIDAKVQAVVAASQKLMEIAQQKAQAQQADGAGEQQAKQDDDVVDAEFEEVKDNK

SEQ ID NO: 35604 - protein, 365 aa, Vibrio angustum S14
MIPRSITSPKKFIIGQDLLSQLDVFIKDFGNNALLICDDFILDRVQQEAVPCLELAGIKACCEKFQYECTDNEIERLRKIVTTQNANVVVGIGGGKTIDVAKAVAHYSNASVVIFPTIASSDAPCTAVSVIYKDSGEFDRYLLLPQNPDVVLADTRIIAQAPEKYFAAGIGDALATFFETRACCYAAGLNLVQKRVSRTGLGMALMCYELIVGNVEMAMEALRRQEVTPALEEMVEAIVYLSGVAAESGGIACAHAICNGMSSLEKFKHIQHGEKVAFGLLVQLVLEKADIEEIENVIYVIKMAGLPLTLADFGIDEWVEDDWRQIVDIACSPSNSMSNMPVAVSAEQVYQAVVAANELAQRYHD

SEQ ID NO: 35605 - protein, 248 aa, Cleome spinosa
MGRGRVELKRIENKINRQVTFAKRRNGLLKKAYELSVLCDAEVALIIFSNRGKLYEFCSSPNMLKTLERYQKCSYGSIEVNNKPAKELENSYREYLKLKSRFEGLQRQQRNLLGEDLGPLNSKELEQIERQLDGSLKQVRSIKTQYMIDQLSELQSREQMLLEANRALSMKLDEMVGARTHHIGGGWEGSEQNVTYGHQPQPQGLFQPLECNPTLQIGYNNPECPEQMTATTQAPAQAGNGYIPGWML

SEQ ID NO: 35606 - protein, 393 aa, Cleome spinosa
MAASTTVIAWGSGEDGQLGLGTNDEKEWVCVVEALEPYAVRSVVSGSRNSLAICDDGTLFTWGWNQRGTLGHPPETKTENIPSQVKALANVKIVQAAIGGWHCLAVDDQGRAYAWGGNEYGQCGEEPGKDEMERPLRRDIVIPKRCAPKLVVRQVAAGGTHSVVLTREGHVWSWGQPWPPGDIKQISIPVRVQGLENVRLIAVGAFHNLALEENGTLWAWGNNEYGQLGTGDTQPRSQPIPVQGLDSLTLVDIAAGGWHSTALTDKGEVYGWGRGEHGRLGFGDNDKSSKMLPQKVNLLAGEDIIQVSCGGTHSVALTRDGRIFSFGRGDHGRLGCGRKVTTGQPLDVPVKIPPPEGQFNDAAEDDDGKWVAKVVACGGRHTLAIVEWKSAAI

SEQ ID NO: 35607 - protein, 248 aa, Cleome spinosa
MGRGRVELKRIENKINRQVTFAKRRNGLLKKAYELSVLCDAEVALIIFSNRGKLYEFCSSSNMLKTLERYQKCSYGSIEVNNRPAKELENSYREYLKLKSRYEGLHRQQRNLLGEDLGPLNSKELEQLERQLDSSLKQVRSIKTQSMLDELSDLQNKEQMLLEANRALSMKLEEMVGARTHQFGGAWEGSEQNVSYGHQAQSQGLFQPLECNPTLQIGYNNPVCSEQMAATTQAPVQAGNGYIPGWML

SEQ ID NO: 35608 - protein, 381 aa, Cleome spinosa
MLKEERTSGGETGENNWARICDTCRSAACTVYCRADSAYLCTSCDARVHAANHVASRHERVWVCESCERAPAAFLCKADAASLCAACDAEIHSANPLARRHHRVPILPISGSMSGPMANHHPSETAMTDTENDMVVGREEAEDEDEDDEEAASWLLLNPGKNSGNNNNQNNGFFFDGEADEYLDLVEYNSSMENQFSDQYSQYHQDCGVPQKSFGGDGVVPLQVEESRGQLHHEQQSFQLAITYGSPGALYGSYNGSMNHSVSMSSMDIVVVPESTASDMAVVSQLRAPKGTTDLLIGPPIQMMPQLSPMDREARVLRYREKKKTRKFEKTIRYASRKAYAETRPRIKGRFAKRTDIEAEVDQAFSTTLMQESGYGIVPSF

SEQ ID NO: 35609 - protein, 333 aa, Cryptomeria japonica
MENAEVKTPEKDAEAEGSPEIVSVELPAPPGWKKQFFPKKWGIVFTAPTGEEIKNKRQLSQYLKSHPGGPANSVFDWGTGDTPRRSTRLSEKPKTTETPESDSKKTPKRSRKSEGTSDERKGKKKKMAEDPSEVEADKDEEMKDADDVEDSVKEKADTAEEADDKKTEDGKEEEPDNKPEEEQENGKEKQEAESEVKVDPSKAEEIKEVAVDKVEDVPVVENEVNVDEEMRNDQVGEKKMEEKKEETKLEETPIVVPEISPIAVPEISPIVVPDEPLDTKEGSTENSKHEEPAKQTEAPNESNIKHTSQETAQQFEINSLHCEQTPAPPSVSC

SEQ ID NO: 35610 - protein, 224 aa, Cryptomeria japonica
MSSAKADEEQLATGYPLLPQNPDSHAHLQYVQPPPPQNSDAHLQFVTPPPPPPPPPPPAYPSPPPQQGNPLRPTQWSSGLCFCTDDPSLCLLTFFCPCITFGRIAEIVGEGSPKCGVSGVIYGLLCVTWYACFGVYGVICVSGFASCYSCTYRTKMRAKFNLAEIPVRDCLLHFFCEPCALCQEYKELKHRGYDPALGWMKNLQKQEREMGIAMAPPVIPPMEK

SEQ ID NO: 35611 - protein, 246 aa, Agrobacterium vitis
DDYVALVGRSGINPEAARTIVRTNTTVIGALSLKRGEADALICGVEGRFDRHVHDVGQILGKKPNVRDFSGLSLLISQRGAVFMTDTFVTENPTAEEVAEMTILAAQAIRQFGITPKAALLSHSNFGSRNCESARKMRAALEILRKEAPELEVDGEMQGGSALSETLRRRAIPNSTLSGDANLLVFPNLDSANISLGLVRTFTDALHVGPILLGAAQPAHVLSTSVTSRGVVNMAALAVVEANQPD

SEQ ID NO: 35612 - protein, 303 aa, Pachysandra terminalis
RAGGRAFSNMAVGYNNVDVNAANKYGVAVGNTPGVLTETTAELAASLSVSAARRIVEADEFMRAGLYDGWLPHLFVGNLLKGQTVGVIGAGRIGSAYARMMIEGFKMNLIYYDLYQATRLEKFVTAYGEFLKANGEPPVTWKRASSMEEVLREADVISLHPILDKTTYHLINKERLSMMKKEAILVNCSRGPVVDEVALVEHLKENPMFRVGLDVFEDEPYMKPGLADMKNAIVVPHIASASKWTREGMATLAALNVLGKIKGYPVWSDPNRVEPFLNKNSPPPAASPSIVNAKALGLTASKL

SEQ ID NO: 35613 - protein, 139 aa, Paracoccus versutus
MKPLERIHQTAKALDRHIILSEGDDPRVAEAARRLLAEGLARVTLMGGPEIPGARRIDPAGAPDLAELADHWHRMRAARGMTGERALAEMRDPIRQAAMRVRLGQADGTLGGAVATTADTVRAALQIIGRAPDAGIVSS

SEQ ID NO: 35614 - protein, 378 aa, Trichodesmium erythraeum IMS101
MLPYLSQFYGNPSSMHTFGGKVGKATRKARSQVAALLNAEDTEIIFTSCGTEGDNAAIRAALTAQPNKRHIITTQVEHPAALSLCKYLEKQGYTVTYLSVDSQGMIDLTELEAAITGNTALVSVMYANNETGVVFPIEKIGQIAKEYGALFHVDGVQAVGKVPLDMKNSTIDMLALSGHKLHAPKGIAALYVRRGTRFRPLLIGGHQERGRRAGTENVPGIIALGKACELAKEHLAHIDKERELRDLLENGILNTIPDCAVNGHLIQRLPNTTNIGFKYIEGEAILLHLSHYGICASSGSACTSGSLEPSHVLRAMGLPYTVLHGSIRFSLSRYTTRQEVEEVLAVMPSIAERLRALSPFKNDQADWLQERQQATVSS

SEQ ID NO: 35615 - protein, 543 aa, Arabidopsis thaliana
MRRFVIGQAKNLIDQSRRRQLHHHKNLSFVSLIPPFSAPSDSSSRHLSSSSSSDMSASDSSSSLPVTLDTINPKVIKCEYAVRGEIVNIAQKLQEDLKTNKDAYPFDEIIYCNIGNPQSLGQQPITFFREVLALCSYTALLDESATHGLFSSDSIERAWKILDQIPGRATGAYSHSQGIKGLRDAIADGIEARDGFPADPNDIFMTDGASPGVHMMMQLLITSEKDGILCPIPQYPLYSASIALHGGTLVPYYLDEASGWGLEISELKKQLEDARSKGITVRALAVINPGNPTGQVLSEENQRDVVNFCKQEGLVLLADEVYQENVYVPDKKFHSFKKVARSMGYGEKDLALVSFQSVSKGYYGECGKRGGYMEVTGFTSDVREQIYKMASVNLCSNISGQILASLIMSPPKPGDDSYESYIAEKDGILSSLARRAKTLEEALNKLEGVTCNRAEGAMYLFPCLHLPQKAIAAAEAEKTAPDNFYCKRLLKATGIVVVPGSGFRQVPGTWHFRCTILPQEDKIPAIVDRLTAFHQSFMDEFRD

SEQ ID NO: 35616 - protein, 266 aa, Hordeum vulgare subsp. vulgare
MNSCSAIIRSMETNQISWQQKPRRDRERQRSHISPRLASLYRITLDLPSPRLSLSHPHRIAPDLPWAGGGSTRAAGQPPEGGSTRIRKTFEDCWATKSILLGYGVHIDECDLSLHDGFKDELHASLGCDGRLPQVFVDGEHLGGAEDVRRLHEAGELSEALDACEMALPTVGGKGAALEACSGCGGVRFVPGAATKIPWRARRAQSLISGTRGRHEQTTAVDESVRLISISFHFCVRFGSGRRTSGQQADTCVRLGHPVGPAFVSG

SEQ ID NO: 35617 - protein, 588 aa, Hordeum vulgare
MVMGSTDRFDKSPLLDGGSSSQESTTEYTGDGSVCTSGHPASKKHTGNWKASSLTIVCSFCCYLAYSSIGKNLVSYLTKVLHETNLDAARHVATWRGTSYLAPLVGAFVADSYLGKYRTALIACTIFIMGMMMLLLSAALPLISAGPHAWTLWADPVSSRYIMFLVRLYMVGLGYGAQSPCVTSFGADQFDDTDEVEKTRKSSFFNWHYFSINAGSLIAGTVIVWVQEHEGWLWGFTISTLFVTLGISVFSLGSIVYRFQKPGGSPLARIWQVVVAASRNFDKVLPCDSSALYEFSGQGSAIEGSRKLVHTSGLEFFDKAAIVTLPDCESPGQLNEWKICTVTQVEELKILIRMFPIWSAMVLFAAVQEQMFSTFVEQGMTMEKHIGSFEIPAASFQSIDTITVIMLVPIYEKVLVPVIRKFTGRANGITSPQRIGIGLCFSMFSMLLAALVESNRLQIAQAEGLVHSKVVVPMSILWQGPQYFLLGVAEVFSNIGLTEFFYDESPDAMRSLGMAFSLLNISVGNYLSSFILSLVPVFTARGGSPGWIPDNLNEGHLDRFYLMMAGLSLLNIFVFAFYARRYKCKKAS

SEQ ID NO: 35618 - protein, 104 aa, Porphyra yezoensis
MTYAIIEASGTQLWIEEGRYYDLNHIPVDPGQSIILGKVLLLNKNGEVTLGRPCIEGVTIKATVMRHLRGKKITVFKMKPKKKMRLKKGHRQELTRLMIDSITS

SEQ ID NO: 35619 - protein, 251 aa, Porphyra yezoensis
MSQTILEIKDLYASVGETTILKGVNLSIRAGEIHAIMGPNGSGKSTLSKVIAGHPAYSLISGDILFFGQSILEIEPDERAKAGIFLAFQYPVEIPGVSNSDFLRIALNARRKFQGLSEFSPLEFFQLITEKIDLVGMQESFLTRNVNEGFSGGEKKRNEILQMALLDSKISILDETDSGLDIDALRVVAKGINTLAKSTNSIILITHYQRLLDYIIPDFVHIMSNGQIVKTGSVTLAQDLEKHGYDWITQT

SEQ ID NO: 35620 - protein, 621 aa, Porphyra yezoensis
MGKVVGIDLGTTNSVIAVMEGGKPTVIPNAEGFRTTASVVAYTKSGDKLVGQIARRQAVINPENTFYSVKRFIGRKQNEISQEIRQTSYNVKTSGSSIKIACPALNKDFAPEEISAQVLRKLVEDASTYLGETVTQAVITVPAYFNDSQRQATKDAGKIAGLDVLRIINEPTAASLSYGLDKQNNETILVFDLGGGTFDVSVLEVGDGVFEVLSTSGDTHLGGDDFDQQIVEWLIKDFKQNEGIDLGKDRQALQRLTEAAEKAKIELSNLTQTEINLPFITATQDGPKHLEKTVTRGKFEELCSNLIDKCSIPVNNALKDAKLEASSIDEVVLVGGSTRIPAIQQMVKRLIGKDPNQSVNPDEVVAIGAAVQAGVLAGEVKDILLLDVTPLSLGVETLGGVMTKIIPRNTTIPTKKSEVFSTAVDNPPNVEIQVLQGERELTKDNKSLGTFRLDGIMPAPRGVPQIEVTFDIDANGILSVKAKEKATGKEQSITISGASTLPKDDVERMVKEAEENFDTDQKRRKNIDTKNQAESLCYQAEKQVKEFEDKISQDLKIKIEELITELRSSLEKEEYDNIESISQQLQNALMDIGKNAAQTESKDTKAKDDDTVIDTDFSEAK

SEQ ID NO: 35621 - protein, 628 aa, Porphyra yezoensis
MKLSWKTLLLWSLPIFVIGFFFWQGFLGPTTTDVGSNIASSRMTYGRFLEYLDMGWVKRVDLYENNHTAIVEAVGPELGNRVQRIRVELPASAPELITKLRKANVDLDAHPPKSTSAVWGLLGNLLFPLLLVGGLAFLFRRSNNASGGPGQAMSFGKSKALFQMEAKTGVVFNDVAGVEEAKEEFQEVVTFLKQPESFTAVGAKIPKGVLLVGPPGTGKTLLAKAIAGEASVPFFSISGSEFVEMFVGVGASRVRDLFKKAKDNAPCIVFIDEIDAVGRQRGTGVGGGNDEREQTLNQLLTEMDGFEGNTGVIVIAATNRADILDSALLRPGRFDRQVSVDVPDFKGRLAILEVHAKNKKMEPKVSLETIARRTPGFSGADLANLLNEAAILTARRRKNAMTMSEIDTSIDRVVAGMEGTPLIDSKSKRLIAYHEVGHAIIGSLLEHHDPVQKVTLIPRGQARGLTWFTPSDDQSLISRSQILARIVGALGGRAAEEIIFGDAEVTTGASNDLQQVTSMARQMVTRFGMSKIGPLSLESQGGDPFLGRGMGGGSEYSDEVATNIDKQVREIVSECYAQAKHIIIDNRVVIDRLVDLLIEKETIEGNEFRDIVKEYTAIPEKNYYISQF

SEQ ID NO: 35622 - protein, 590 aa, Porphyra yezoensis
MPLKQRVSSEKTGAFALLDSIVRHGVKHIFGYPGGAILPIYDELYAWEEASLIKHILVRHEQGAAHAADSYSRSTGEVGVCFATSGPGATNLVSGIATAHIDSVPILAITGQVGRAFIGTDAFQEVDIFGITLPIVKHSYVVRDPRDMSRIVAEAFFICKHGRPGPVLIDVPKDVGLEKFNYFSVEPGKVNIPGCRPITSLKSRQILMAAKMIQQSSQPLLYIGGGAIISDSHQIIKELVDFYKIPVTTTLMGKGIFNEDSDYCLGMLGMHGTAYANFAVSECDLLIALGARFDDRVTGKLDEFACNAQVIHVDIDPAEVGKNRIPQVAIVGDVAEVVSEILNLLKTSFPPYPEQIISWQERINRWRQQYPLLVPRKSTSISPQVILVATNKLAQNAYFTTDVGQHQMWSAQFLKVKAKHWLSSAGLGTMGYGLPAAIGAQVAHPNDVVICISGDSSFQMNMQELGTIAQYQLPVKIIIINNRWQGMVRQWQQAFYGERYSHSRMTEGAPDFQKLAEAFGIKAFTINNRQNMQSALQVAIDYPGPVLLDCQVTENENCYPMVAPGKSNAQMIGIAKPQRGTASNYINNSV

SEQ ID NO: 35623 - protein, 821 aa, Porphyra yezoensis
MFERFTEKAIKVIMLAQEEARRLGHNFVGTEQILLGLVGEGTGIAAQVLKSMNVNLKDARVEVEKIIGRGSGFVAVEIPFTPRAKRVLELSLEEARQLGHNYIGTEHLLMGLVREGEGVAARVLENLAVDVSSIRAEVIQMLGENAEANVSGSNTTQARSKTPTLEEFGSNLTQMAMEGGLDPVVGRQKEIERVIQILGRRTKNNPVLIGEPGVGKTAIAEGLAQRIANRDVPSILEDKLVITLDVGLLVAGTKYRGEFEERLKRIMDEIKSADNVILVIDEVHTLIGAGAAEGAIDAANLLKPALARGELQCIGATTLEEYRKHIEKDPALERRFQPVVVGEPSVEETIEILFGLRDRYEKHHQLTMSDGALAAAAKYANQYISDRFLPDKAIDLIDEAGSRVRLLNSQLPPAARELDKELRAVLKTKDEAIRAQKYETAEQYRAREMEIKAQIAAIAQSKKNEPDLNLEDPVVTEDDIAEIVAAWTGIPVTKLTKSESEKLMHMEETLHGRIIGQDEAVVAVSRAIRRARVGLKNPNRPIASFIFSGPTGVGKTELTKALASYFFGSEASMIRLDMSEYMERHTVSKLIGSPPGYVGYSEGGYLTEAVRKKPYTVILFDEIEKAHPDIFNLLLQILEDGRLTDAKGRTIDFKNTLLIMTSNIGSKVIEKGGGSLGFELSEDQTESQYTRVRSLVNEELKQYFRPEFLNRLDEIIVFRQLTKDEVREIAELMLNEVFARIKQQDIQLNVTERFKQRLVEEGYNPSYGARPLRRAVMRLLEDSLAEEVLSGKIKAGDSAVVDVTNEGEVTVLLGEKLELLT

SEQ ID NO: 35624 - protein, 237 aa, Porphyra yezoensis
MTKNCLNQENCIPIFSENSSGDFFSCNPWLLFFNRNKINYQIFSLKKNDTLLFNSSSRLYIILIGSLIITKVLRNTHKVTLNLLTTGDTFGQIELVDDNFYYEAEAIDKTEVACINYTTIIKACSNCAPFNLFFVNHLVFCSAKAYHFIEIISHKSITSRLASLLLLLAEQNGTQVNNGIMLNFTITHKILAQIIGSNRVSVTRILANLLKTKLISIQKKRIIVHSPVLLSQRILNQ

SEQ ID NO: 35625 - protein, 1538 aa, Porphyra yezoensis
MFNQKIVDQAPRKLTSRLTNSSSLISIEKERDACGVGFIADVNNVANHKIVVQALEALTCMEHRGACSADRDSGDGAGITTAIPWNLFQKSLQNQNIKFEQNDSVGVGMLFLPAHKLKESKLIIETVLKEENLEIIGWRLVPTVQEVLGKQAYLNKPHVEQVFCKSSNLSKDRLEQQLFLVRKKIEKYIGINGKDWAHEFYICSLSCYTIVYKGMMRSAVLGQFYQDLYHSEYTSSFAIYHRRFSTNTMPKWPLAQPMRFVSHNGEINTLLGNLNWMQSREPLLQSKVWKDRIHELKPITNKDNSDSANLDAAVELLIASGRSPEEALMILVPEAFQNQPDFANNTEISDFYEYYSGLQEPWDGPALVVFTNGKVIGATLDRNGLRPARYVITKDNLVIVSSESGVVQVEPGNVKSKGRLGPGQMISVDIFSHKILNNKEIKTSVTTKIPYGELLTDARQILEHKPFLSDQQVDIKKLMQLQTAFGYTNEDVELVIEHMASQAKEPTFCMGDDIPLSILSEKSHILYDYFKQRFAQVTNPAIDPLRESLVMSLAIQIGHKSNLLDDQPTLAKHIKLESPVINEGELNAIFESKLSCIRINTLFQLEDGPKNFKQQIQQLCENASQAILDGNNILVLSDKNNSLDSEKVSIPPLLAVGAVHHHLINKGLRQEASILVETAQCWSTHHFACLIGYGASAICPYLAFETARHWWSNPKTKMLMSKGRLPACNIQEAQANYKKAVEAGLLKILSKMGISLLSSYHGAQIFEILGLGSEVVNLAFKGTTSQIGGLSMIELGRETVNIHSKAFSEVKTKKLANYGFVQYRPGGEYHINNPEMSKALHQAVRGYNPEYYNNYQSLLQNRPPTALRDLLKLQSNRAPISIDEVESIEDILQKFCTGGMSLGALSRETHETLAIAMNRIGGKSNSGEGGEDPVRFKILNDVNSSGTSPLLPHLKGLKNGDTASSAIKQIASGRFGVTPEYLMNAKQLEIKIAQGAKPGEGGQLPGKKISPYIATLRKCKPGVPLISPPPHHDIYSIEDLSQLIFDLHQINPKAKISVKLVSEIGIGTIAAGVAKGNADIIQISGHDGGTGASPLSSIKHAGSPWELGLSEVHQLLAENQLRDRVTLRVDGGLRTGSDIVLAAIMGAEEFGFGTVAMIATGCIMARICHTNKCPVGVATQREELRARFSGVPEALVNFFLFIGNEVREILASLGYKSLDDITGQNHLLIKNTDINLTKTNGIQLDTLININNNTWTKFNSVHTNGPVMDDDILAIPEVSNAIKLETEITKHFKIANTNRTVGTRLSGIIAKNYGNTGFKGLIKLNFYGSAGQSFGAFLASGINLKLMGEANDYVGKGMNGGSIVIVPPAGTIYEDNNQVIIGNTCLYGATGGYLFAQGQAGERFAVRNSLAESVVEGVGDHACEYMTGGVIVVLGKAGRNVGAGMTGGLAYFLDEDENFIDRVNSEIVKIQRVITKAGEEQLKNLIENHAAKTGSLKAHTILEKWNSYLPQFWQVVPPSEANIDETNPTYSSNTIAAC

SEQ ID NO: 35626 - protein, 107 aa, Porphyra yezoensis
MDTETKKRIDQLLNDHKIVLFMKGNKTMPMCGFSNTATQILNTLNIKYFTYDILEDENIRKAIKEYSSWPTIPQLYINREFIGGADIMLELFETGELQAQVEALLAT

SEQ ID NO: 35627 - protein, 142 aa, Xylella fastidiosa 9a5c
MSVIGYNHFPYFAAFPMQLSLLKAKIHRATVSHSELNYEGSIAIDGLLLEAAGLYEFEKVHIWNVTNGARFTTYAIRAEHGSGIISVNGGAARYVQVGDLVIVAAFAQMSEDEAAVFSPNLVYVDAANAMTHTNHSIPTQVA

SEQ ID NO: 35628 - protein, 509 aa, Xylella fastidiosa 9a5c
MKQISILVRLFITPYVSYPCGFLHSSRPVMSFLPSFLKRKSIDLITVHEEGRRLVPTLSWPHLIALGIGAIVGTGIYTLIGVGAEKAGPAILLSFVIAGVICACAALAYAEMATMMPVAGSTYTYSYVALGEGIAWIVGWSLILEYSLVVSTVAVGWSGYMSGFLKSVGVDMPLALTAGPYAGGIINLPAVVITCVVAGLLIVGTKESTTLNAVLVVVKIIALSVFVVIALPHFDMAHLKPFMPYGFTKSIDTGGVERGVMAAAAIIFFAFYGFDAISTAAEETKNPSRDLSIGIIGSMIGCTLIYVLVALAAIGAMHYTVFGPSTEPLALILRQLDQGNTARLIGAAAIIALPTVLLAFLYGQSRILFVMSRDGLLPRGLSTVNARTGTPIATTLFTAILVATAAGLVPLGEIAALANAGTLTAFIAVALCLLVLRVREPQRVRAFRTPLAWVVGPIAIAGCLYLFWSLPKMTQSLFLLWNALGLCVYLVYGRHTSLLSKAVSIDTPR

SEQ ID NO: 35629 - protein, 425 aa, Xylella fastidiosa 9a5c
MMSNSPQTPLATRQRLSEVRYEIRGELARRARELEAEGRKLIKLNIGNPGAFGFRAPEHLQRAIADDMGRTDPYTHQQGLPIAREAIAAAYVRRHYPDADADRVFVGNGVSELIDLSLRALLNPGDEVLVPSPDYPLWSAATILNDGRPVYYRCAPENGFQPDAVEIETLVSSRTRAIVLINPNNPSGANYSQELLERIVAIAVKHHLLLLVDEIYDQILYDGAVFVPVAPLAGTHPCITFSGLSKVHRACGWRVGWALLSGSSIQIDNLRNAMDLLGALRLCANVPGQYAIDAAVNGPDTITPLCSPGGPLYETRRAVIEACVVSEHLSLVVPAGALYAFPSVVGPAARHFDDYAFALELMNDEGVLVVPGSSFNVPYRDHFRVTLLPDAALIREVFSRIDRALSRRAEVAEKVVPLKSRSAAA

SEQ ID NO: 35630 - protein, 347 aa, Xylella fastidiosa 9a5c
MIAGNGGDGCVSFRREKFIPLGGPDGGDGGDGGSVWLVADENLNTLVDFRHERIFKAQRGVNGMGQQMYGKAGQDKIISVPIGTVVINVQTDEVIGDMVRHGDRLLVAKGGTGGLGNMHFKSSINRAPRQARPGEQGEERTLKLELKLLADIGMLGFPNVGKSTFIRAVSAATPKVADYPFTTLYPNLGVVKIEAYSSFVIADVPGLIEGAADGVGLGTQFLRHLQRTKLLLHMVDISATADAYGNEKVGVGLLPIEQVRKLEIELERHDPALLDKPRWLVLNKADLMPQEEAQALAEALIAELHWTAPWYLVSAVSREGTWPIMKSAMTLFEHQREVAAEQSVSSR

SEQ ID NO: 35631 - protein, 295 aa, Francisella tularensis subsp. mediasiatica
MAKMSKQVGIIGLGNMGSVVIDHLLTSGYEIFIHNRTKAKAEKWLRNTQVVWCDSPKELAENCEIIICCLYNDIAAKNVYLSKNGLTSINLVNHTILDASTLSVSCFEQLNKVVTQNNGKLIDMPISGNPAALQEKRALIMLGATEEECKSFVHFLEALSNKILYLDIAGSALKEKLCINEMLFTQWFSYCEAMLLAENNGIKTEDFFKAMSQSVISSPLLVQRSQYFFGYNVNLSDLNMILKDIDIIEDFVNKSKTKVTLLQKFREVVEYAIKHDFTNQDFYGLYRAYKEIYKK

SEQ ID NO: 35632 - protein, 66 aa, Candidatus Kuenenia stuttgartiensis
MPQGTVKWFNDSKGFGFISQDNGEDVFVHQTAIECEGFRTLAEGDKVEFEVVKDQKGYKATKVVKL

SEQ ID NO: 35633 - protein, 632 aa, Candidatus Kuenenia stuttgartiensis
MKVVILAGGKGTRMGSLSQNIPKPMINIANKPILQYQIEIAKRFNLTDIILLTGYKGEVVEDYFGNGENWGVNISCYRETIPLGTAGAVKEVEDYLHDDFLVFYGDVIMDIDLKSVIRYHMKRKPIATLVVHPNDHPYDSDLIEVNNEGKVITFHSKPHKQDIFIRNLVNAALYILSPRIMNFLPKGTYSDFGKDIFPKLVNDGEIIYAYNTPEYIKDIGTLERLEEVERDIVSGKLYRLNKKNKRKAIFLDRDGVLNYEIDLLRTPEELELLPDVPNAIKKINTSEYLSVVVTNQPVVAKGLASEKDIYQIHSKLDTVLGRNRAFLDRIYYCPHHPEKGFHGERIEYKIHCDCRKPNTGMINQAVYDLNIDLDESFIIGDRTVDILTGINAGLKTILVRTGYAGDDGVFQCEPDFIFSNLKESTEFIIDCYDALVNKAKDILSGISINNKRNIIILIAGLSRSGKSTFSKIISTILNKKGIHNTHLNLDNWLVGIQERKDWMAVSERYKYNEIVKDIATLLEGKEIKVNKYNVKTRNIDEHQKSIILKEGEALIIDGVVGLDIEFLRKIADIKIYVEINETMRRKRFFDFYMFKGLTEEEIKKLYVKRQDDEIPIVIQTKNYADYIIPMEK

SEQ ID NO: 35634 - protein, 670 aa, Candidatus Kuenenia stuttgartiensis
MCGIAGLIDLSGKAIDPEILKSMSDVIRHRGPDDEGYVLIDQATSRFQTYAGHDSPSDIQEFNPNFKSSTTAFAGNLGLSHRRFSIIDLTAAGHQPFYDNDRSCCVVFNGEIYNYIELRAELESRGHIFRSHSDTEVLLEAYKAWDVECFTRFNGFWALALYDFRKKRLILSRDRLGKRPLYWVRNDSRIYFASEIKSLLKVPENARNKKVNQEAIWYWCSSGLRDLNLSTCFEGIFSLPSASWVIVDENFPNKLKTFWKVPEKRMSENDIGISEAATLVRETLMEAVRIRLRADVPIALELSGGLDSSAILALTAQIHPERITTYTVRFHDPRTNEEPFARSVAKHYNVDYRVIDPPSQTFWQHILAFTYLQEEPYHSPNLQTSQDIWSHMRGEGIKVTLTGAAGDEMFAGYSRYYAKAQRENLQTGHYLQFIENALLWSERRYNFKTMALSLIRSPIRYLFNNLMPQASRVRQRNRNYLRNISISQRQCNTETLTETLYSDITNALIPYWLRSGDKTLMGMPFEGRCPFLDYRVVEIATQLPITYLIRHGWHKWILRKALEDYLPSDVLWRKQKMGFPFPYQTFYENSRKIIDLILSHADNPFIELSNKEKFQKDWRAISFILWYEMFFNENLTLFKKIESMINQSCTTTDSKYTPEFLSSCEVTSIT

SEQ ID NO: 35635 - protein, 215 aa, Candidatus Kuenenia stuttgartiensis
MKFFIDTADVKEIREAHDLGILDGVTTNPSLVAKTGRPFRETLEEICSIVKGPVSAEAVSLDTQGLVDEARELSKIAENIVVKIPLIKDGLKAVKILSEEGINTNVTLCFSANQALLAAKAGATYISPFVGRLDDIGHTGMDVIEDIRAIYDNYGFATEIIVASIRNPNHVRDAALMGADISTIPFNVFNLLVQHPLTDAGIKKFLADWEKVPKK

SEQ ID NO: 35636 - protein, 524 aa, Candidatus Kuenenia stuttgartiensis
MESFESLGLSESTLKVLKEKGYEEPTPIQQKTIPAILSGTKDIVGQAQTGTGKTAAFGLPVLELLPEKSKNVQALVLTPTRELAIQVAEELNSLKGKKRLSIVPIYGRQSMELQLRSLKKGIDIVVGTPGRVLDHLKRGTLKIGKISFLVLDEADEMLNMGFIDDVREIMENTGHEKRTLLFSATMPFEIMQIAKNYMRDFDVQKVNAGQLTVSQTDQIYFEVFAADKFEALCRIIDIEKDFYGLVFCRTKIDVDAVASHLIERGYDADALHGDISQSLREKILAKFKKRQINILIATDVAARGLDIHNLSHVINYSLPQDPESYVHRIGRTGRAGKGGIAITFITPEEYRKLQFIQKAAKTDIRKEKLPKIEDIIRTKKLKIKDHINEIVDLNAHNCYIEMAKELTEHKKPEDIISALLQYSFPDELNEKRYVEIEEAVVDKKGKTRLFVTQGKQEGLTHKKLVTYIKDISNIASEKIRDVQILDKYSFVTLPFREAEILLTSFKRRKKGSGLFITKAKKMRT

SEQ ID NO: 35637 - protein, 66 aa, Candidatus Kuenenia stuttgartiensis
MANGTVKWFNDSKGFGFISQENGTDVFVHQTSIKSEGFRTLAEGDKVEFDVISDQKGQKATNVVKV

SEQ ID NO: 35638 - protein, 420 aa, Candidatus Kuenenia stuttgartiensis
MTKQRKKVVLAYSGGLDTSVAIKWIPEKYDMDVITVTVDLGAVKDLESIRQKALKIGAKKAIVVDAKDTFVKYFVMPALQAGALYEGVYPLATALGRPLIAKLLADAAEDEKADAVAHGCTGKGNDQVRLDVSLQVLNPRLQIIAPLREWKMSRDEEIQYAEEHGIHVEAKVNSPYSTDENLWGRSVECGVLEDPWMEPPADVYKWTRNIKDVPDEPAYIEIDFEKGIPIALNGKKTEGVALINTLNALGGEHGVGRIDHIENRLVGIKSREIYEAPAAIILHAAHKALEGMNMTKDALRFKEIVSSHYADLIYNGLWFSAFHQDLVAYVLSSQRIVNGTIRVKLSKGSCAVVGRKSPHALYSEELATYQKTDVFDHAASLGFIKIYGLPVKTQSQKQMNVLSGREALNLESIMPPKLLP

SEQ ID NO: 35639 - protein, 300 aa, Candidatus Kuenenia stuttgartiensis
MLYTGAVDAIAAVSLKKATCMKHSLIGFLTLSVMAGFYIGFGVLIAFIVAAPIGAINPGLGKIAAGIFFGLALALVVFAGAELFTGYNLLIFKGCFRGTVTFGDSMLGWFWTYIGNLAGSMLFALMLIPTGVFAKDPWLSFLLKVATYKMNAPWWELFFRGIFCNWLVCLAVWSSFRCTSDSGKLIMIWWCLFCFVTTGMEHCVANMSIMTLACLLPHDPAVINFGKMFGWNLVSVTLGNIVGGGFFVTFLYWFATYMDERGAKRMSAAIQGGSGAGELPGAGQTFEEIKDVKVKMKMKA

SEQ ID NO: 35640 - protein, 187 aa, Candidatus Kuenenia stuttgartiensis
MKKKRAAFLDRDGTIVVHTPYLSSPEQLKLLPHAVEGIRLFKDHDYLIIVVTNQSGIARGYFDEQSLIQTHEKLKKILIIEKAEVDAFYYCPHHAEGVVEQYRMHCDCRKPRPKMLFDAAQQYNIDLSQSIMIGDSPADILAGKEAGCKSALIINPNHEQEADPDAPFGADYVVKDLLEAARLFIPE

SEQ ID NO: 35641 - protein, 301 aa, Candidatus Kuenenia stuttgartiensis
MLFMQNKKDFRSGYVAVIGEPNVGKSTLINNYMGCKLSIVTHKPQTTRKKIMGILTKEDYQIIFFDTPGIIEPTYELQKYMVKTAYSVIKEADILLMMVEPFKQPAKIHRDVVKKLATFNKPILLVINKVDMVEKDKLLPIIASYNTLMKFSEIIPISAKEGTNLERLLSLIVQYLPEGEPLYPEDSITDYNERFLAAEIIREKVFEFYGEEIPYSSTVEIEEFKEREKGRDYIKAIIYVERKSQKGIIIGEEGKAIKHVGVIARKDIEDQLGREVFLELHVKVMEKWRKDTHKLKRLGYQ

SEQ ID NO: 35642 - protein, 397 aa, Candidatus Kuenenia stuttgartiensis
MKVVYADNNATTKVAPEVLEEMLPFFSEYYGNPSSMHIFGGQVAKKIDKARQQVADLIGAGPEEILFTSCGTESDNTAILGILRANPGKKHIVTSRVEHPAVYNLCTYLTQHGYHVTELGVDRNGMLNVDELSEAVREDTAIVSIMHANNETGVIFPIEEVAGIVKQKGSFLHTDAVQAVGKIPINLADSAIDLLTLSGHKLHAPKGVGALYIRKGTSIAPFIIGGHQEKNRRGGTENVPSIIGLGKACELAKKFMQEEQTRVKQLCDRLESEIVAKAPDAIINGYKSPRLPNTTNISFEYVEGEAILLLLNEKGICASSGSACTSGSLEPSHVLRAMGIPFTAVHGSIRLSLSRYTTTDDVEYIIEHLPPVVRRLREISPYNRDSKFQGHVSAGYC

SEQ ID NO: 35643 - protein, 329 aa, Candidatus Kuenenia stuttgartiensis
MLNGLTEKQPLSDIDYAKKVLLLESEAIKNQIHRIDNHFQKAVDIIFTCSGRVAVTGVGKAGIIGQKISATLASTGTPSYWIHSSEARHGDLGKIVASDIVLALSNSGETEVVLLLPFLKQMGTKIISVTGNNKSSLALHSDVVLDIGNVEEACPLGIAPSSSTTAMLAIGDAIALTIFKKRNLSKEEYAFYHPGGELGRKLLPVEVVMRKGRENPVADEDMPLLDVLGIMTETKGNPGAVSIVDKNNRLTGFFTDGDLRRLLREGTSFLCKTIKEVMTPFPKVINNRCLVEEAYKILRENKIDQIPVVNDFHTPVGIFDVQDLLEVRF

SEQ ID NO: 35644 - protein, 679 aa, Candidatus Kuenenia stuttgartiensis
MENIQININHLWVIMAACMVFLMQLGFTSYETGFSQSKNAISIALRNLVDTLISSLVFFSVGFGFMFGKSYMGLIGIDLFFANDLALHPNTLSYSFFFFQMVFASTAATILTGAIAERSGFIPNIAGTAFIVAIIYPIFGHWAWGNLFSPDQTGWLKELGFIDFAGATVVHSIGGWFAMAAAIMVGPRIDKYNPDGSSNRIGLHNVPLATLGTFFLWFGWFGFNGGSLLRVSVNIGLVILNTNMAAASAGVSALIFIYATRKRIEAGSLFTAILAGLVAITASSNMVTPVSAVAIGLITGILAIIAEGFIEKTLKIDDPVSAIAVHGVGGVIGTLCVAIFAQKSYLLAENGSRMHQLGIQALGVIVAFSWSFGLGMLFFLCLKKVKRLRVTPEEEKRGLNVAEYEDVASWLDFIRITRLQDINTILEKRVQEKTADLQMANVALEKANRLKSEFLTTMSHELRTPLNAIIGFAEVLRDEIAGSLSKDQKEYVTDIHSSGHHLLDMINNILDLSKIETGKMHLQYEEFCIEDAINDTLTIINASANNKGISVHTNIQDNTPLLSADKTKFRQILYNLLSNAVKFTPENGKITINVFQKDNSLQFEIVDTGIGIKPEDKEKLFEAFHQADASLTREYEGTGLGLHLTKRLVELHGGKIWAESTFGKGSTFFFILPINPVNK

SEQ ID NO: 35645 - protein, 662 aa, Candidatus Kuenenia stuttgartiensis
MIGGAHFRHLMKHHTPVFYVSVVLTALLVFWGYFAHEHLADTAQSTLTFTINNFGWFYLLSTAGFVGFCLYLIFSPYAYIKLGKQDDPPEYSFSSWLAMLFSAGMGIGLVFFGVAEPMNHFAHPPHGLAEPHSPEAARMALRYSFFHWCLHPWAIYAVIGLSMAYAQFRRGESGLISTVFRPLIGRKVDGPIGQLIDILAVLATVCGVATSLGLGTLQINGGLHHIFGVPNTVPIQMLIIVIVTVLYLISASTGLNKGILYLSNINLLIAGLLLAFVLVCGPTVFILDSFTTVIGSYLHEFVKMSFRLTPFRQGDEWVGSWTLFYWSWWIAWAPFVGTFIARISKGRTVREFVIGVLFVPSVIGALWFAAFGGSALYFDLFQDGSIADAVQSDMTSALFITLEQFPLGIVLGTLAALLIVTFFVTSADSATFVLGMLTTNGSANPPTSTKVIWGILLSSIAAVLLFSGGLAGLQTASIVTALPFAVIMVFMCLALFTALRKDCQVTHPRTPESEPKNILCPVDYSIYSEKALNYAIEIAGKYGSKLYLIHVLDARVHGVNEPVLYRFNIGDESAIKELKERLLRCVQEDIRSKMPVESIIVQGVPFVEIVKAAREYAIDLIVMGTHGRTGISHAIMGSVAETVVRKAHCPVFTVRQAEYDSG

SEQ ID NO: 35646 - protein, 620 aa, Candidatus Kuenenia stuttgartiensis
MMIKKRFLGLPLVSVLLFTMTFLCINDHIAYGQLPQPTRTQPQPGFSPRPQPTGTQPQPGFSPRPRPTGTQPQPGFSPRPQPTGTQPQPGFSPRPQPTGTQPQPGFSPRPQPTGTQPQPGFSPRPRPTGTQPQPGFSPRPRPTGTQPQPAPTPGVVTPQISGGWSHSLALDSEGKLWAWGLNEDGQLGDGTNDSQTTPVAVQINALTTITAVDCGGDHSMALDSLGRVWAWGYNGDGELGGGTTENNSNVPVPVPVPNLTDIIAISAGGEYSIALSSDGSVLTWGANSDGQLGNGNTDQNSVPTKISSLPLMKGISAGEAHSLAVTEDGFVYAWGLNDEGQIGNGEKSADNPVLNPVQVQGLTDIDAVCAGATFSLALGIDGRVWAWGLNDEGQLGDGTNTNSTTPVEVTNLAKISAVACGSDHSLAIRNGKVKSWGLNDEGQLGDGSTRSSSAPLDVTGLSDIVYVAAGESHSLAITSKGNIYVWGLNGDGQLGDGTNRSSRTPKTIDLNLGVTAVEGPGECETDDIEADPKKLKLKVGKSTEVTLTLTGEDGCLVEGESITVKLNSSGKRRVSISPSKLTSDENGNASFTATANAKGKAKITAKAGSSKVKIKVKVKE

SEQ ID NO: 35647 - protein, 457 aa, Candidatus Kuenenia stuttgartiensis
MSKEKILIIDDDASILEVLQMRLKALGYSVSIAKDGDEAKTVLFQNKINLVLVDLRLSEENGIELMRDIIKNYPKLPIIIITAHGSIESAVEAMRRGAYSYIAKPFRNDDLAMQIKNALEKQRLTQEIEYLRNQLDERNNFNPIIGKNKQMLEILELVSRVSKTDCNVIIYGESGTGKELIARAIHQNSNRANGPFIATNCGAIPEGLLENELFGHIRGAYTDAHESKEGLFAQADKGSIFLDEISNTSMIFQIKLLRVLQEREIKPVGSTKNRKINVRIIAASNTDLQKAVSEGTFRDDLFYRIHVMPVYLPPLRQRKDDIPLLATYFITEFCKALKKDPLGFSPAALQRMLLYDWPGNIRELRNKIEHAAIVANKNNIEPEDIFPERNTTTNVFHSYKDAKERFEREYIENLLKANNGNITNASKMASRYRADIYKLIKKYNINPEDYKAHVSKL

SEQ ID NO: 35648 - protein, 304 aa, Candidatus Kuenenia stuttgartiensis
MKDANAQSPVKLIDIDAYTPYKIATTIYDVTIHKAALNRSKSFSLGVLAGIYLGFGAQFSTLVTSDSTLHYGITSLIEGIVYSLGFILAVIGGAEVFTGNCLGIIGFAGKKITLYELLTNWGVIYIGNLVGSLTMVWWMYETHQWEFFNHMVGAKALLIAHNKVNLSFNAAFTRGVLCNALICLAIWICFSGKSTADKIFSIIFPIGGFVASGFEQCVSNMYFIPMGIMLRKNHFVVDAAEKMAGRTLNLSQLTWKGFFINNLLPVTFGNIVGGVMLIGIMFWFIYLRPRTKKTHMGCPVDYNK

SEQ ID NO: 35649 - protein, 1590 aa, Candidatus Kuenenia stuttgartiensis
MVNRKIIFIVFILCSLSCLLPNSLKAHEEYVGTLQVVAIDEIDKITGELRCKYAHYLKTEEGIRYRIEDTEGVLRKLKPSGKIKISGDKIGNRIIVNTAKSLSAVPPEPTHRKIVAATEETAETIGEQKTLVALFNYPDKQDKPFTIDDVKNWILNDTDSVNNFIKENSYDKAWITADFIDFMTLPNNSTYYAGDNYVSLFFEDAITTLDATVNFQDYARLIFFYLQNGEAGWIFGRGSIGKWGMSSEDGDFSASVSWIIGDFSSKSVISHEFGHNLGFIHSASVLCDDNQYYIPETLWDPTSSCGTDAYEEYGDDDTMGSDYKHFSTIWKSQAQWIDSSQIREATNSEYTIDQVELPSDGTKVLKIPLGKDNDGNDFYYWVEYRKSLGVFDNEDVVQVRTKPTSLTGSEWGSNSLRFKKSTTKGDYLDIDADNSFYDPYRGVKIELVEETGSNSDAKVKLKVTMAPLVTTGYITNLESDSATLNGTVNPYGEETTVWFEYGTTSGSYSNTTSTQTVSGSADTTVSIDISSLSENTTYYYRIVAQNSNGTVYGTENNFMLITVTPKIAAGARHSLALKSNGTVWAWGNNGDGQLGDETTKNRTIPAQVSNVNAITTIDGGASHSLALKSDGTVWVWGANWDGQLGDGTNTRKTTPVQISGLSDIISIACGMYHSIALKSDGTVWAFGRNDYGQLGDGTNVYRNKPVQVSGLSDVIAIAGGDYHCLALKSDGIVWAWGNNESGQLGDGTTTNRNTPVQVSSISNVAAIARGWVHSLALKSDETVWAWGSNGSGQLGDGTTTNRTTPVNITNINNIIAIAGGGGYTIALKSDGTGWTCGEYGWDYSENNGSSYWGYSYRTTPDQVAGINDVVAVAGGWQHIVVLKQDGTVWTWGVNWYGQLGDGTTTDRDTPVQVDINLGEMPDTFPPEGSISINSGVSYTNSTSVTLTLSATDATGVTGYYYSESSSTPSASDSGWTSVSSTTSYSESVSYTLSSDDGSKTIYVWYRDAAGNVSSTASDSITRDTTAPTVSITSPTSDATYSTTSSTISLSGSASDSTSGVYSVTWSNNATGSSGMASGTTSWTVSSVNLSNGNNTITIIATDNAGNEATDTVTVTYSGTTLPTPTQTPSTETGTVGGFVTDEDTGAGIEGATVRNQSGLYTDTTDATGYYQIDNIPAGSYTFSAIATGYSSQSATGVVIAEGETTTLDFALQVTVPTSPTPTVSPTPPTATLVVDVTYTGGNVVVGATVTADGRTATTGANGRATFSNLATGDYTVTVSLTGYDTATVDVTVVAPVTRQAVKLSLTTSTPTPSPTPKTATLAVAVSDTDGNVVVGATVTVDGQTATTGANGSATFSNLATGDYTVTVSLTGYDTATVDVTVVAPVTRQAVKLSLTTSTPTPSPTPKTATLAVAVSDTDGNVVVGATVTVDGQTATTGANGSATFSNLATGDYTVTVSLTGYDTATVDVTVVAPVTRQAVKLSLTTCPDEVAATTASVDQVSLILAKGSSYDVTITVTDDDDCPAQGVKVKRRVSSANNKKVSVSPTSATTDASGQVAFTIKAKKNKGNANVKFNVSGVKDKPKVKATLTN

SEQ ID NO: 35650 - protein, 1135 aa, Candidatus Kuenenia stuttgartiensis
MESRSSINDKHAICGICPAGCWVTVTYDEKGMIDKVCPDRSSHLGMICKLGEHSAEIVYSKDRLRYPMRRKGPKGTYEFERISWDNAYDIIVENLNKIKEESGPEATAIYTGRGSFELAMCDIFQPKGVAVSSASSVLFPFGSPNTLGVGALCYVSFAMIAPHTTMGGMLINMFSDLENAQMIVVWGTNPATDCPPFDLNRIVNAQKQGAQIVVIDPRRTMTAKLTDAEWIPIRPGTDGALALGMCNVIIEEELYDEDFVKNWSVGFDDLARYVQHFGPDAVESITGVPAETIKSLARRIAEANGASPIMYSGLEYSDSGVQAIRATMVLWALAGQLDVPGGRCFTMHQNNFPINREDRIANPDVRKALGRERFPVYSAYRGESHAIALPESVLEGRPYRIRSLIILGGSIITAWPQPAVWRKTLNKLDFLVSVDRQLTADAAYADIVLPATTMYEIESYMTYGPIFRIREKVIEPVGEARNDFFILSELARRLGYGHLYPKNEEELLRHVLKGSGFALEDVQHAKGTVQTPTVMMQYKKWEKGLLRTDGKPGFDTPTGKFEIASTILEEHGYDPLPIYTEPGEGPHSQPDLAEEFPLVFNSGSRVTTDFRSQHHGISGLLKERPEPTVTINTLDAEARNIKSGDLVNIMTKRGTVTMCALVTDDIVQGAIDANMGGGGSVGPEKWQNCNVNELTDLQRYDPISGFPVYKTLLCDVAKATEREKIVEVDSGEYCDTAGMVESSVKPRHIEKRIYLDHNATTPLDPEVKKIMLQFIENGHGNPSSIYTEGKDARFAVEAARRSVAQLLNCTARRIIFTGGGSEANNLAVKGVAFANWNSKNHIITTTIEHPSVINTCEWLERHGFMVTYLKIDKTGKLNPEDLKSAITEKTCLISVMMANNETGSINPIAALVLIAKERNVLFHSDCVQAVGKIPIDVEALGVDLLTMSGHKLYGPKGVGALYISKGIVLEPLVNGGKQESGMRAGTENVLGIVGLGKAAELAVRRIHEMDRIKRMRDRLEAGIRELMAEAKMNGNPEALLPNTLNMTLPGIRGESVVLALDQKGISLSSGSACRAGSPKPSHALLAMGLTEEEAHCALRFSLGFGNMMEEIDRTITLLGEVIRDKKTMVRFVPCR

SEQ ID NO: 35651 - protein, 307 aa, Candidatus Kuenenia stuttgartiensis
MLKKLRDSVLSSVQFGAFCYNFKSELEAYNKSKVILFGVPYDGTVSYQSGTKKGPNAILDASVNIEPYDDELGNIFKIGIFTVGNLNIEEFYTNEKKVMEEIFTCSRKVIDDNKFLVTLGGEHSISQGAIKAYKNKYKKLSVLQLDAHLDLLNEFGGSKYNHASVMRRVVEDIGCRVTSFGVRVTSQEELEFVKKNKKSVSVFYARNIYNNDLWHDEALKTLEENVYITLDVDGLDISIMPATGTPVPGGIGWYQTIDFLRKVYEKKNVVGFDIVELKPNIGNEAPNFLAANLVYKNIGFYKKYSRQ

SEQ ID NO: 35652 - protein, 413 aa, Candidatus Kuenenia stuttgartiensis
MGLIVQKFGGTSVADAERIKAAARRVTETYDAGNKVIVVVSARGQTTDELIELANEIIDKPSTREMDMLLSTGEQVSIALMAMAIHALGYPAISFTGGQVGIVTDSFHTKARIRNINADRIRKELDNGSIVIVAGFQGIDVNENITTLGRGGSDTTAVALASILHADRCDIFTDVDGIYTADPRKVPNARKLNKISYDEILELASLGAQVMHSRSIEFAKKYNVPLYVRSSFNNSEGTLICKEIDDMENIVVSGATVSKNDAKITIRSIPDVPGQAAKIFHEIAKKNINVDMIIQNASVEGRADVTFTVPRSDLKNALETAEKIKKDLWAMEVLYDDKIAKLSVVGIGMRSHCGVAEKMFSILAEEKINIQMISTSEIKISCIIDEAHAERALNAVHKIFGLNLVKNEVAAKV

SEQ ID NO: 35653 - protein, 440 aa, Candidatus Kuenenia stuttgartiensis
MDMREKSVMKEHRGLARELNFFDVVCMGFNCVVGAGIFLLAGQLDSLVGIGALLVFPLCGLLCFAVALCFAEIGSMYDKTGGAYLYTKDVFGPFAGFLVGWIMWLASIIGWASVASGFGLYCNYFLPKDQQWLSKVIITALVIGLSITNYCGVKPGARSINFFSIGKFTALFIFIVAGMFFVKRENFGQLHSSGSFSMATTLALYAYTGFEFLVVPAGEMKNPQKHIPRVIMVVFMMVTALYALIQYVAMGTYPDLAGSDKPLADAAFYFLGPAGGIIIGIGALLSIGGVNAGIALTSPRSLYVLSADGFFPPVFAKIHPKYHTPYLAIAVNTVLTLLLGLTGSFRYLIAASVLVSILQYVPTCLAVIALRRKRPDRKRGYKIPGGYGIPVLALIICGWLLCHVELKIIGATALAIAVSLPFYFRGRFFRKNPCPYKKQP

SEQ ID NO: 35654 - protein, 448 aa, Candidatus Kuenenia stuttgartiensis
MTKPKLLVVEDDKNTLDGLIQILRRDGYTAVGVSSGYDALNQLSRESFDIVITDMKLPGMGGLSLLQEIKKKNSSIAIVVVTAYSSIKSAVNAVKHGADEYLAKPVDVEELELVLEKLREKQQLVIQNRLLKEELKDKYTFSELVGGSPQMHRIFKMIEDVAPSTASVLIMGETGTGKELVAHAIHYRSERAGKPFVALHCAALSEGILESELFGHEKGAFTGAIQSRKGRFELADGGTLFLDELAEMSLKVQVKLLRVLEKGEFERVGGEKTIKVDVRCIAATNRNLEEEVSEGRFREDLFYRLNVINIQMPPLRERKDDIPILSNYFAVKYAKKYKKEIKGFDPEAIKALLSHHWQGNIRELQNTIERAIVLCKSDTISVDHLPESIMPDNEYIPVIKIPIGTTLKEAEKEIIQRTLQITNGSKQSAAKILGISTRKIEYKTKEWC

SEQ ID NO: 35655 - protein, 456 aa, Candidatus Kuenenia stuttgartiensis
MSVEKIMVVDDDALGREYLCETLKRGGYDVTGVGNGQQAVSRIGKEDFDMIFMDMKMPGMDGMEALEKVKGISSETVVILMTAYGTIESAVEAMRKGAYDYIIKPFSPDQIELLISRVNERQKLIAENKYWRSASNVDEKSEPVYSKNSKMSQIYEQLKKIAQSKASVLIQGESGTGKELVARAIHYFSPRCEKPFIRVNCAALAESLLESELFGHERGAYTGAVAKRIGRFELANEGTLLLDEVSEISPNIQAKLLRVLEEEEFERVGGEKTIKIDVRIVATTNRDLAKEIQKGTFREDLFYRLNVVPIHLPPLRERREDIPLLANTYLEKYSSENNSSVKSIEKRAMDYLSQYNWPGNVRELKNIMQRAVVMGSSEELGLENFTSLIDIKKSEHTMCNDSVNIKKNGQSIEDAEKELIFTTLEKTGGNKTKAAGLLKITTRTLRNKLNKYVIAQ

SEQ ID NO: 35656 - protein, 511 aa, Candidatus Kuenenia stuttgartiensis
MKKKILLVDDEETLRWALQNTLLDDGYDVEETNDSIEALELAKKRKYDLVISDLTMPFMNGVQLIAEIKKANPSIRAIIMTGYGSTEAVIEAMHTGVSDFITKPFKLEHMKKVIRKVLSEGENTGTNAHSEKKRGNEEPRPCEVYTDKHKDSSCYIVQDETEKANLTFYDAVETDDRQLALFGSFSREAGLENLDTVIKTVFRYEAKTCRSPASLIKNMNTFLCENIKNRFPLMLFCVILEKQGQKLSYSICGEGLACFVFSQEKEMTQLQSYPLFLNMFPDISVPEQTLPMPAGNRFIVIDSNAVATSIRKGIIQKDRLRDALVRDVAGDCEHVAKKMKEGIVGWHELTADARNCSVAAFTLENGRCMPWKEEISISMPIDDYDEVLQLFEEKLSKIVGDECKRHDIITSVNEAVLNALFFAYKEGEKGEIVLKFSRLGEDIIIVVSDRGCGFDTQNYEEPDTTFYKGIARKDGRGIFVMKQLMDRVMIQSGRGTGTSVFLAKRVNFYGN

SEQ ID NO: 35657 - protein, 1413 aa, Candidatus Kuenenia stuttgartiensis
MRLKILTVLRVSMVASVVCGLMFFTQYTAGSYDGYAIGSTTGSLPDDGGSTPTATTGSATCVSLSSVLLNGWVNGNGLATTAWFDYGTSTGMYFDATTTIPCGTGSTYVNATLGDLTPWTTYYCRIASQNIGGISYGSETTFIPRSQISAGAYHTLTLKPDGAVWTWGANWNGQLGDESTTNRSTPVQVSGLTDVIAIAGGAYHTIALKSDGTVWAWGNNEGGQLGDGSTTDRSTPVQVSGLTDVIAIAGGYAHTIALKSDGTVWAWGDNEGGRLGDGSTTNRSIPVKVGGLSDVIAIAGGNAHTIALKSDGTVWAWGDNEGGQLGDGSTTNRSTPVKVSGLADVIAIAGGYSHTIVLRSDGTVWTWGHNEGGQLGDGSTTNRSTPVQVSGLADVIAIAGGVYHTIAVKSDGTMWAWGYNWYGQLGDGTTINSSTPVQVNGLTDVIAIAGGYYHTIAMKSDGAVWTWGFNYYGQLGDGSITNRSTPAQRSLSGMKSVATPTVTTGSATCVSLSSALLNGWVNGNGVATTAWFDYGTSTGMYFDATKTISCGTGSTYVGATLGDLTPWTTYYCRIASQNIGGIYYGSETTFMPRTQISAGAYHTLTLKPDGTVWAYGANWNSQLGDGSTTDSSTPVQVSGLTDAIAIAGGVYHTIALKSDGTVWTWGWNNSGQLGDGTTINRSTPVQVIGLTDVIAIAGGDYHTIALKSDGTVWTWGFNYYGQLGGGATTNRSTPVQVKGLADIIAIAGGYVHSIALKSDGTVWAWGYNGYGQLGDGSTTDHLTPVQVSGLTDIIAIAGGYIHTIALKSDGTVWAWGHNEGGQLGDGTTTNSSTPVQVSGLTDVIAVTARLYHTIALKSDGTVWTWGRNIYGQLGDGSTTERSLPVQVIGLTDVIAIAGGYYHTIALKSDGAVWAWGYNGNNQLGNWSTKNSSTPVRSLRYDMNSVTTPAVITGSTTCVSLSSVLLNGWVDGNRAATTAWFDYGTSSGVYFDTTATIPCGTSSAYISATLGSLTPWTTYYYRIAAQNSRGISYGSETIFLPRSQISAGAYHTLTLKPDGTVWACGANWNGQLGDGTTINRSTPVQVSGLTDVIAIAGGDYHTIALKSDNTVWAWGSNSYGQLGDGTITNRSIPTPVTYLTNIIAIAGGYVHTIALKSDGTVWAWGYNGYGQLGDGSTTNRSTPVQVSGLTDVIAIAGEYVHTVALKSDGTVWAWGYNGYGQLGDGSTTNRSTPVQVSGLTDVIAIAGGYVHTIALKSDGTVWTWGWNNSGQLGDGTTINRLTPVQVSGLTDAIAIAGGDYHTIALKSDNTVWAWGSNSYGQLGDGTTINRLTPVQVSGLTDAIAIAGGDYHTIALKSDNTVWAWGSNSYGQLGDVSTANSLTPAQCLLSPIVSTGTAINIGTTMVRSTPTARLP

SEQ ID NO: 35658 - protein, 632 aa, Candidatus Kuenenia stuttgartiensis
MKNTSFLSECGKLLSFAKPYWRQMAIAIGCMVLYTAANGIQISLIKPVIDKLVSGELTTATTTALPAIDIDPQTDLKKNTRSPLSEFKKNTLNKFSFIGKLRERMTRSFTSIGIVIAILAPVIFFTSYFQQYYRNFVRWAVVVNIRNKVCDHLLPQPLSFFENRKSGDLLSRLTNDVAVTQAGLKVLFDEVLFLPMQLICGLVLAFYFSWKLSLFSLIIFPVVFIPAVLIGKKIKRHGKGSLRHLSELTDAFREIFAGIRIVKSFRMEDEERREIHFIGERFLRRTLKMVKAKSLNSSTNEFIYAVGLAAMVILGGYVVMSHQITPGELGGFITAIGFMVITSVKKIAKSYTGLQESLAGANRVFELFNIESNIKDSPDAVTLEKIEEGIFFNNVSFSYEGKKEHVLKNICLNIQKGEVIAIVGESGAGKSTLVNLISRFYDPTEGSIAIDGIDLRRIKRESLLSHMALVTQQTFLFNRSLYENILYGRRDATMEEIQHAAKAANIHEFILSLPETYDTIVGEMGVKLSGGQRQRIAIARAILKNASILLLDEATSSLDYESEKLVQDALNNLIAGKTTIIVAHRLSTIQHCDRIIVMKQGQIVETGSHASLIHDDGEYKRVYQLHSNALHT

SEQ ID NO: 35659 - protein, 565 aa, Candidatus Kuenenia stuttgartiensis
MCYLLQKPMIKTGSHILINALIREGVEYVFGIPGGAVLPLFDALYESQIKFILTRHEQGAGHAADGFARATGKVGVCLATSGPGATNLTTAIATAYMDSVPMVALTGQVKTFLIGNDAFQEVDIIGITRPITKHSYLVKDVKDLARVVKEAFYLANSGRQGPVLIDLPVDVTMAECEEIIPPEIDLPGYKPTYEGNIRQIKIAAEVINNARRPVLYTGGGIIASDSAKELLELAEKGNIPVTTTLMGLGGFPENHNLSLGMLGMHGTAYANFAVTTCDILIAIGARFDDRITGKIDEFAPNAKIIHIDIDPSSISKNIKVDIPVVGYAQNTLRELNKHISFVERREWFDKIKQWKEQNPLTYNNSGDLIKPQYVIEQIYEATNGEAIITTEVGQNQMWAAQYYTYTKPRTFLSSGGLGTMGYGFPAAIGAQLGCPDKIVVDIAGDGSIQMNIQELSTVVRLNIPVKIVILNNGYLGMVRQWQELFYDKRYSSVSLNGNPDFVKLAESYGAKGFLIEKKEDVRPTLEKAFFTKQPVVMDFRVDPNENVFPMVPSGKPIHQMIGTMA

SEQ ID NO: 35660 - protein, 296 aa, Candidatus Kuenenia stuttgartiensis
MGNDMSEFRRAAHAGAAHSPVQTAAIVENKAVARAGLRVMQTFILSIMAGIFVAMGAQFATFVTSDSALHLGITSLIMGIVFSLGLILVETAGAELFTGNNLNVMGYLSKRITTRDLLRIWIIVYVGNFIGGILMVFWMYLAHQWEFFHFMTGAKALLIAHKKTTLSFEAALARGVLCNALVCLNVWLCYSGRSMADKVLSVLFPIGGFVASGFEHCVANMYFIPMGLVLRKNQAVVAAAEEMAGKTLDISQLTWKGFFINNLFPVTIGNFVGGVVLVGVVFWFIYLRPHNCYSKR

SEQ ID NO: 35661 - protein, 303 aa, Candidatus Kuenenia stuttgartiensis
MSETKGTDISNQKCNKLVTGADACEPFETAKKAGLVGRARTNLDALTLLGLGILAGVFIALGMQLSVLVTHTATSSYGLNQLVGGVAFTLSMVLIVITGAELFMGNPLVAMSFLSGKITGRAFTRNVIIAFIGNLIGALTLVVWIYKSEQWMMSNYLLGAKIILMANEKVNTSFGVLLARGMMGNALICLGVWLCYCSKSNIDKILSLLWPVSCIMACGFEHGAVNMWLIPMGIILKDNRMVLTVAEKVHGGRLDLSNLTFFKGFLFDNLCPVVLGNVIGGVVLVAGAYWFVYLRFPEKGKEV

SEQ ID NO: 35662 - protein, 563 aa, Candidatus Kuenenia stuttgartiensis
MDRKSLIALIICGVIMLLYYPIILPLLSPKTEKVTQEELSAEKRRLETKNEIRTVTPALLPSQETLREMDIHEEEVVIENECIRTVWINDGAALKSVKLKDFKSQDSKDTLELIKDADTEYRPLAISYIYQKADFQRQRYRITDRSKGRISFSTSLESGLNLIKTVSIPDGKYQVDMEIVLENNTDAEISLAYDIIASSMITHEGVISTDIAGLVGIDMGNHKIKLVSTAPKGFPAKNESRGIVWAGSTNKYFATVLKPASSEWVASVHLQAFDMQGMPSEEKAEQGDFMVSLQTGRIHIAPHTSVRHGYLYFVGPKKEEVLGQYGTMDAIISYGWLNVISKLLLGFLNAVHNVIPNYGISIIVLTIIIKALLFPLTRKSQVSMFRMQQLQPLINQLKEKYKNNKQKIGQEQVLLFKKYGVNPMSGCLPMILQLPVFFALFRTLQLSFEMRQAPFVFWINDLSMPDTLMYLPFTIPFLGNTLNILPIIMTGASFVQMKLTPKSPATDPQAQAQQKMMSFMPIMFAFILYKMPSGLTLYWTTSTIFSIVESLFIRKSIKKIKIV

SEQ ID NO: 35663 - protein, 448 aa, Candidatus Kuenenia stuttgartiensis
MSKKPTILFTDDEGTFRNIMSKELDRMGYNVTCCASGQETIKNMQERDYDVAILDMNMPVMNGIETLKKVKTIEPTTEVIILTGQGSIENAVQAIKLGAYDYLTKPCQLKELDLLLQRALEKRKLSRENFHLKTLVHDVQKPSSMIGNSPAIKAVFKMIDKTAPSDVTVLIQGESGTGKELAAKMIHQYSKRADKPFVIVNCATLQESLLESELFGHVKGAFTGAAESRVGLFEIAEGGTLFLDEIGELTVNTQAKLLRVIQSGEIRRVGDNRVITVDARIIAATHKNLPLEVKEGRFREDLYFRLNVITLRLPSLRERKDDLTALIQHFLQKFCKGERTMDMHPEALHAMTLYDWPGNIRELENTIERTVVLADGNIISIEELPDNIRGRTYEHYGKNGEIALSEVEKNHIIQVLKEKNWHKPLAAKTLGISLKTLYNKMKMYNIDL

SEQ ID NO: 35664 - protein, 535 aa, Candidatus Kuenenia stuttgartiensis
MLFFWKGSVMLVLIADDLPDVCNEILQNAGVEVLKKTGLKPPELDAVIKMCDGVIVRSNTKLTAPVLEKSEKLKAICRAGVGVDNIDVPAATKKGIVVMNTPAGNIISTAEHTIALLCSLSRFVPQACASVKEGKWEKKKFTGQQLTGKTFGIIGLGRVGRQVAKRAAALEMKVIGYDPFITTEISSQYNIHIVKNLRDLLAQADYITIHVTLNKETKNLITSKEFSLMKKGVQIINCARGGVICEEDLYNAIKTGQVAGAALDVFEEEPPKDNKLLQLEEVIATPHLGASTEEAQYAVAIEAAEQMAAALTGKGYKNAVNLSPYSPEEYASLKSYLALAEKMGSFLTQINNAGIQTLDIVYTGEISHKNIRIVTDSLIVGLLKPSLEEGVNLVSAPTLLAERGIKVNVTTSSNACDFSSLVAAKITTSNGETCISGTVFGKNEPRLVDINGYGVEAILNEQILVLFGRDKPGFIGQVGSLLGNKNINIAHMTFGRKEVGGNTISILNIDAVPPQDCLNEIKQLNHIDAAFLVQL

SEQ ID NO: 35665 - protein, 139 aa, Candidatus Kuenenia stuttgartiensis
MRPEQIELVRKTFAKIQPVSYKAAEMFYRHLFETDPSLRQLFKRDIKKQGRMLMQMIDFAVKGLDDPEIILPAIQALGKRHIGYGVKEEHYETVGNALLWTLEQGLGDAFTLEVKEAWSEAYKLLAGVMIEAASGSKCT

SEQ ID NO: 35666 - protein, 334 aa, Candidatus Kuenenia stuttgartiensis
MFVDEAVIYVKGGDGGNGCVSFRREKYVPHGGPNGGDGGKGGDIILLASEKIETLLDITSRVKHIADNGIHGKGSNKNGKDGKDIVLLLPRGTLIKDKESDRILKDMSTAGESIVIARGGKGGRGNKHFATATNRVPREAEDGQPGEARWLILELKLFADAGLIGMPNAGKSTLLSRISKARPKIADYPFTTLQPQLGVVEIENFRRFIVADIPGLIEGAHKGIGLGDEFLRHIERTKVLVHMLDASVFPEKDPLEAYRIIRNELKQYNPKLTEKTEIVVANKMDLLDEETGAACIKKLEENISHPVCPVSTITGKNLSSLIYLLSKTLQKDTA

SEQ ID NO: 35667 - protein, 672 aa, Candidatus Kuenenia stuttgartiensis
MKKEFHSKGTYVRLLCYLKPYWRRVIVILLLSIISAFVAVLPIQILGIAVDEIRMADRHANRNVETTHALSLPAQKANMSGDEPVLKKKYSIPMAKPLLKMSGYIHNHWFLEHNAIMVTLVFLASGFLVLHAISSCISLAHGYITSELGQRLVYDMRNQLYGHIQQFPLSYFENNKTGDIMSRIMNDVNSLEQAIVGPVITFITDMFKFFWIIYFCMKLDWQLTCIVLFVCPFISLCTYSFGKRIRRVFRSLREKTGDLNALIQDNISGIRVIAGFAKETEELERFKHKNYENYFLHVRILRLVNTLRPAVDFITETGAVAVICLGGYKVLQGQLSAGTFVIFFPYLQMMYGPITGLTRFYNQVQRAIASTERVFEALDTPVELQDAPDALPLPVVQGFVEFKHVHFMYGKDKEVLTDINITACPGQMIAFVGPSGSGKTTLTKLLPRFYDPVKGDIFIDGHNIKNVTLHSLRKQMAMVLQETFLFNDTVRINIAYARSDASDRDVEYAAKAANAHDFIMQLPNGYESIIGERGVKLSGGQKQRIAIARAILANPRILILDEATSSVDTETEQLIQNAIYRLVKNRTTFIIAHRLSTILHADRIVVLENGRIVEAGLHQELLANNGLYKKLFEMQFDTQEKIKPKPETETGEGMKIPEPVIDIEELRQTMEW

SEQ ID NO: 35668 - protein, 387 aa, Candidatus Kuenenia stuttgartiensis
MKKLYMDNTAGTPMHPQVIDAIIPFLKEGYGNPSNIHQFGRFTSDAIRSARESVANLINAKANEIIFTSSGTEANNFAIKGISAANKKKGNHIITSAIEHFSVLNPLKSLEKSGYEITCLPVDKYGLVNPDDVKNAIKPTTILVSILFANGEIGTIEPIREISAVVKAKDIIFHTDAVAAAGNIPIDVADVAVDVLSMSANQFYGPSGTGALYVREGVRLLPLIEGGVQEGGRRAGTENVIGIVGMGKAAELAKSEMPQRTKQIQKLRDMLHDGLLGKISHIHINGHLTNKLPGNLSVCIEFIEGESVLLFLDMQGIAISSGSACTSRSLKASHVIMATGVDPALAQGTVLFSIGRENTEEDVECVLEKMPPIVERLRQMSPLYQQK

SEQ ID NO: 35669 - protein, 336 aa, Candidatus Kuenenia stuttgartiensis
MNKIIECVPNFSEGKDPRKVAKIADAVQRVKGVKLLNVESDPDYNRTVITFAGEPEAVRDAAFSAIETAANVIDMTLQKGEHPRIGATDVCPFVPVANITMSECVKIAHLLGKDVGERIGIPVYLYAEAANVPRRYLLPDIRKGEYEGLSKKMNDAEWRPDYGPSVFNDRVKKTGATVIGAREFLIAYNVNLDTDDISVANTISGMIRSSGRMKLNEKGEKERVAGTLKFVQAMGVDLKEYKITQVSTNILNYKVTPPHVVFEEIKKLANVYGVNVRGSEVIGLIPKGAIIEAGRFYSSEENEQNLVNVAVEKLGLSQLNKFAPDKKVVEYILGLN

SEQ ID NO: 35670 - protein, 79 aa, Candidatus Kuenenia stuttgartiensis
MVSIKYKENEIMAIGKVKWFDAKKGFGFIEQDGGGDVFVHYSNIGGDGFKTLEDGEKVEFEVVEGAKGLQAQKVNRVAS

SEQ ID NO: 35671 - protein, 400 aa, Candidatus Kuenenia stuttgartiensis
MFREGVFFFMVLSRVAREIQASATLAITAKAKQLAAEGKDVIGFGAGEPDFDTPENIKNAAIKAIKNGFTKYTPTSGVPKLKEAICEKLFNDNHLKYASSQILVSAGAKQSICNIALVLCDTGDEAIIPSPYWVSYPEMVTLAGAKPVFLETTDKDSFKITKESLAKVITPKSKLLFLNSPSNPTGMVYTEEELREIVMFAVEKGLYVISDEIYEKILYDGAAHFSPAAINDDCYNKVVTVNGFSKVYSMTGWRLGYAAGPEKIIKAATNIQDHTTSGANSITQLAGLEALRGSQESVTVMVKEFDRRRKYIVERLNTIKGISCLLPQGAFYAFPNVSRLCENLSLKGSFDLVSLLLEKAHIAFVPGAPFGADAHIRISYATSMENIEKGMDRFEKFLNT

SEQ ID NO: 35672 - protein, 387 aa, Candidatus Kuenenia stuttgartiensis
MRNIFSHFIFSVCKLFLCLVVVFLVSTLAVKTSFAVQVAPKIAAGAFHTLALKPDGSLWSWGKNEYGQLGDGTIKNKHSPVQVKHLSSIIVIDGGAWHSIALKSDGTVWAWGGNWAGQLGDGSYKSSNIPIKTKELSGIIAISCGGQHNLALKSDGTVWAWGINDKGQLGIGDAKNQQIPIRIPGLNNIVAISAGGYHSLAIKSDGSLWAWGSNNMEQLGDGSATNRCSPVHVSNLRDIIAVNGGGDFSLALKSDGTIMAWGSNGLSQLGDGTTTNRNTPVNVSDVRDIIEIAAKGNHSLALTIEGKVWEFGSIGATPTEKEVTLPAYRPVLVNEITDVIAIACGEFHNVVLKNDGSLWVWGINNFGQLGDGTVGSKTKPVLICKWY

SEQ ID NO: 35673 - protein, 215 aa, Candidatus Kuenenia stuttgartiensis
MSIFIDTATPEEAKIAKDFGWVKGITTNPLLLAGAGRKAESVLAQLAELNMGKLFYQLISSNSKDMHKEARMAKEIAGDQLVLKIPPVAAGFQAVYSLSKEIPCCVTALYSVSQALVASEAGAQYIAVYVNRATKLIGDGLALLNAMSKILHGSTTEILAASIKSSEEASSSLLCGADHLTLPFNILSTLCIHEHSEEAVRQFNSGGTGIQIEVK

SEQ ID NO: 35674 - protein, 567 aa, Candidatus Kuenenia stuttgartiensis
MSTDNPASGIDFIREIIAEDIKTNKHGGRVVTRFPPEPNGYLHIGHAKSICLNFGIALENKGGVCHLRFDDTNPCKEEIEYVESIKNDVHWLGFDWGTHLYYTSDYFEKLYEYAVQLIRLGKAYVCSLSADEIREHRGTLTQPGKDSPYRTRTIEENLDLFTRMRNGEFADGAQVLRAKIDMSSPNLNMRDPAIYRIRRTKHHRTGDTWCIYPMYDFAHCLSDSIEGITHSICTTEFENHRPLYDWILDTLGVECHPQQIEFARLNLSYTVMSKRKLLELVEEKQVSGWDDPRMPTISGMRRRGYTPEAIRNFCERIGVAKRESMVDIALLEHFVREDLNKHALRVMAVLRPLKVVIVNYPEGHVEELECINNPEDPNMGTRKAPFSRVLYIEQDDFCEEPPKKFFRLAPGREVRLRYAYFITCIKAIKDEVTGEIKELHCTYDPETRGGSAPDGRKVKSTIHWVSAEHSIEAEVRLYDHLFIKESPCGEKDETDFKKFLNPNSLEIIAKCRVEPGLADAKPGSRYQFERIGYFCVDAKDTAGKKPVFNRTALLRDTWAKEQKAEVK

SEQ ID NO: 35675 - protein, 519 aa, Candidatus Kuenenia stuttgartiensis
MKMYNKFMIGVWLLLIMGLFAFGTGVAEAAGDPNGSDTYSESIEGLKISINVVWTLIAAFLVFSMQAGFAFLGGFLRQKNMLNYLAHCFIDSTLGACVFYFFGFAVMFGGSQAYSGLDRGWPGIGWDGFMLLGDAYDVKTVMFWLFQMVFATKTVTIIAGAVAERMKFVPYIIYSCLMCGIIYPLYGHWVWGGGWLSTLPIGAGVVDFAGCAVVHTVGGIMALMGAWAVGPRKGKYNPDGSPNAIPGHNMTYVVIGCFILAFGWFGFNAGSTVAGTDLRIAIIATNTFLAAAAGASIMLFFTWKRQGFVDVSFVCNGALAGLVAITAPCAYVAPWAAVVIGVLAGLIMRGAVALVEVVFKIDDPLGAVAVHGANGMWGMLAVGLFADGTYGINGLILGTGEQLLAQFIGTVVAFAYAFAFGGAVFFGLKGTIGLRVSDLEEEEGLDIAYHGTSCYPVEGGFFGAVGEHLIDVQAEKEQISLLEEAISKDRSRERIYSEKLGRWVYGKAKQEKQSSNSKK

SEQ ID NO: 35676 - protein, 451 aa, Candidatus Kuenenia stuttgartiensis
MKRCLLFITLIVIVTCLANDMFAGDPSGKETYSDSIQGLKFSVNFAWILMSAFLVFNMQVGFVFLGAGFVQKKNTLNYGTMSFMDFCAGAIIFWLFGFALMFGGSQLAPGLTNGNKFIGYSGFLLIGDSYDVHISALWLFQVMFASTASTIVTGAIAERCKFHAHVLNSIFLCGILYPVYGHWMWGYGWLETLPFGVGARDFAGSGVVHGVGGLIAFVAAWRVGPRYGKYNPDGSSNVIRGHNLLYIVIGTLILIFGWFGFNAGSTLAVTELRVSIIATNTFLAAAAGALTLLYISYFMTKTFGVSMACNGALAGCVAITASGAYVPHWAAIVIGAIGSALTCFSLDFIENKLKIDDPVGAISVHGVNGIWGLLAVGVFADGTYCEVRGLITGSGWQLLSQFIASITLIVWCLGMGFLFLSFLKRVIGLRDPISAEQKGLDLYEHGSGCYQ

SEQ ID NO: 35677 - protein, 386 aa, Candidatus Kuenenia stuttgartiensis
MGEVKVYFDNNASTPIDPNVIVEMEPFIRQYYGNPSSGHWFGKKGREAVDTARRQVAELIGASPHEIIFTSGGSESNNHALKGVAFALKGKGNHIVTSVVEHPAIINPCKYLETKGFKVTYVGVDEYGCVNADDIEEAIIDETVLVSVMHANNETGTIQPIAEISKICRKRGIYFHSDTAQSVGKIPVDVNELGVDLLTIAGHKFHAPKGVGALYIREGVDVEPLIHGASHEMGLRAGTENVAGVVGLGKASLMSAVRMDEYIKNIRYLRDLLHEKLKGIAAVKLNGHPTQRLPNTLNVSFEGIDSSALVSKLEDVALSTGSACHDQVRRPSTVLTAMNIPAELAMGAVRFSLGRFNTEDEVNYVVDEIKRVMSEIGIKKMRGEDV

SEQ ID NO: 35678 - protein, 411 aa, Candidatus Kuenenia stuttgartiensis
MIIKLQKGFSENMVINISYCILIVAAMLTFCCSLFAAVPQISGGGSHSLVLKPDGTVWAWGGNHAGQLGDGTTNPRKFAIQVKGLEDVVSIAAGWEHNLAVKSDGTVWAWGNNRFGQLGDGTNENRNTPVKVKTIKDVTEIDAGFYHSIALQSDGTVWVWGNNELDQLGDGTKSDAYKPMQVQGLNNVVAVSGGNHHNLVLKADGTIWGWGANGYGQLGDGTMTESSIPTPVYDFNGAVFIASGNNYNVAVKADGSIWGWGMNTYGQLGNGTQTNSKIPIRINGLNNSVSIATGGYHALILQQDGTVLSMGYNRTGQLGTGATSNYQYTTLKVHGLSDVVSIAAGYYHSLALKKDGTIWAWGNNEYGQLGDGTLNYKKLPILSQIKLDQTITPAPKEDSASANTPIPTLVK

SEQ ID NO: 35679 - protein, 363 aa, Candidatus Kuenenia stuttgartiensis
MIASRMSNIDSSGIRKVFDLAQKMKSPVNLSIGQPDFDVPGEIKEVAIKSINEGANKYTLTQGIPELRNVLMDRLKKDREVTTEDIMVTSGVSGALTLAIMTLVDQEDEVIIPDPAFVIYKHMVNFCSGKSVFVDTYPDFKLSAERIEPHITKKTKIIVINSPANPTGVMNTPQELKDIAELAKKHDLLVISDEIYHDYDYNNEFESIGKYYNKTLILDGFSKSFAMTGWRLGYAAGPETIIKEMIKLQQYTFVCAPSFSQYAVFRSWGFDLSKYIADYRKKRDMMYEGLKDKFRIIKPEGAFYFFPQVPWGTDEEFVMAAIKNNLLIIPGSVFSERHTHFRISYAATEETIEKGIKILNGLA

SEQ ID NO: 35680 - protein, 455 aa, Candidatus Kuenenia stuttgartiensis
MSNKILIVDDEKLMRISLESQLKKEGYDVSSVDNANEGMSLIRSEEFDIVVTDLRLPNMNGMELLKEIKNYNPDIIVVIMTAYGTLESAVAATKEGAYDYIAKPFSTDELIIKLQRALQHKNTTAEVTRLRREIQSEFEFHNIVGSSHAMKKLIETVKEISDRDSTILIQGESGTGKEKIAGAVHYHSGRKMGPFIRVSCAALNREILESELFGHEKGSFTGAIKTRRGRFELANGGSIFLDDVDDIPLDMQVKLLRVIQERTFERVGGEKTLSINVRIICATKKDLLLLAKKGEFREDLFYRLNVVPITIPPLRERKDDIPRLINYFLKKFVSRHEDALPGVSRETLNVLMEYNWPGNVRELENVIEHAVAFSHSHGITIDTLPDYLKRVEIHKKLISMDLSNTQTIQLHDVLTEVEKRLIEWAHQKTNGNQVKMAEILGIPRTTLRNKLVRLK

SEQ ID NO: 35681 - protein, 228 aa, Candidatus Kuenenia stuttgartiensis
MYETNIYLHLKNVPLFNSLANEQLKTLFRAGITKSFPKDHVIFYQHDHGDTFYIVITGKVKITLLNEDGKEIVLSLLKEGDFFGEMSLMDDETRSVSAVCVENTTLFLFTRNQFHKLISNYPGLLTKIFTEICSRLRHANKKIESLAFLDVCGRTIQLLQQLKLEQGEKTNAGIEISHAPTHKEIASMVGASRETITRIIKVLKDNNTLVSYKGRKVILREHANNLLI

SEQ ID NO: 35682 - protein, 363 aa, Candidatus Kuenenia stuttgartiensis
MSDHPKNDMNEEYCENINESEYVQNDTERQNNNADEHHEINPDKNKPVFEKKEQKKEVNNLYGIPVIDIDAYAPIKMADRVGQVGIAKTQMSMLTTLALSILAGVFIALGAQLSMLVTHTATSNLGMNQLLGGVAFTLALVLIVIAGAELFTGNCLIAMSYMAGKITGRDLTRNLIIAFIGNFIGALTLVLWIYNSGQWTFSNYLLGAKIVLAANEKVNLPFSVAFFRGLLCNMLVCLAIWLCYSGRSNMDKILSLLWPISCLIACGFEHCVVNMWLIPMGIILKGNSSVLAAIMKVQGRVDFSNLTFFKGFMIDNLIPVVLGNLMGGMVLVAGMYWYIYLRLTSKKENRISLKRIMEYILKT

SEQ ID NO: 35683 - protein, 304 aa, Candidatus Kuenenia stuttgartiensis
MTESKIAKHVKLIDIDAYSPPQIADKIDKIALVKAKLGITQTFALGVLAGLYIGIGAQFATLVISDSTLHFGINSLIAGVVFSLGLMLVVVGGAELFTGNCLIIMGYVSKRVTTMEVANNWTVSFSGNFVGSLLMVFLMYNTHQWELFNHMVGAKALLIANTKVNLSFKFALARGVLCNAMVCLAVWLCFSGRSSADKILSILFPIGGFVASGFEHCVANMYFIPIGIFLSKQPEVVVAAEKMAGKPIDLSLLTWKGFFVNNLVPVTLGNIVGGVILVGIVFWFVYLRPVIKINFNVKQDFFDK

SEQ ID NO: 35684 - protein, 322 aa, Candidatus Kuenenia stuttgartiensis
MDKKRRIEELDHLKIFSGNANPDLARKICEHLSINLGNAYVGRFPDGEIDLKVNEDVRGADVFLVQPTCAPVNESLTELLIFIDCLKRASAARITAVLPYYGYARKDRKDEGRVPITAKLVANLITTAGADRVLTLDLHAAQIQGFFDIPVDHLLAFPVMMKYFEQLKTEDLVVVTPDVGGIKLARNYSKGLGVKMAIVDKRRVGPEETEVGFIIGEVANKNVIMIDDLIATGGSIAQAAYVLKEKGAREIYVGATHPVFCGSAIEKLSAAPIKEIVITDSIPLSEKARATGDKFKVLSISGLLGDAIMRIHHHESVSSLFV

SEQ ID NO: 35685 - protein, 120 aa, Candidatus Kuenenia stuttgartiensis
MLREMCKSKIHGATVTETNLEYNGSITIDKSLLTAVDILHYERVQVLNINNGTRVETYVIEGEQDSGIICLNGAAARWAQPGDRVIIIAYCLINNKDAIGWKPKIILVDAKNKLIKNLPT

SEQ ID NO: 35686 - protein, 628 aa, Blastocladiella emersonii
MSTEAFNGGIGIDLGTTYSCVAYMTPDGRVEVIANEQGNRTTPSYVSFSEEKLVGDAAKNQAAMNPKNTVFDAKRLIGRRFDEPSVKKDMALWPFTVVDKSGAPYIEVEYMGETKTFSPQEISAMVLVKMREIAEMKIGQTVSKAVVTVPAYFNDSQRQATKDAGSIAGLDVLRIINEPTAAAIAYGLDQKNKEAKGEKNVLIFDLGGGTFDVSLLTIADGVFTVKATAGDTHLGGEDFDNNLVNHFAAEFKRKHKKDLTSDKRALRRLRTACERAKRSLSTLAKATVEIDSLFQGVDFYSTITRAKFEEINSVPFNSTMDPVKQVLKDAKFDKKNVDDVVLVGGSTRIPKIQALLSEFFDGKELNKSINPDEAVAYGAAVQAAVLTNTASAATSDLLLLDVVPLSLGVEMEGGIMGVVVPRNTPIPTIKKRVFTTTHDNQTTVEFPIYEGERTQTKDNNLLGEFTLSGLPPAPRGVPELEVIVEVDANGLLKVTAIERTSGLSANVTIANKAGRLNADEIDRLVKEAEVYKRADAEHTARIEAKQQLEEYIYQVEATMQDANVALKLKNSDAIIEELGEAMEWLDLNKDASKDELIARKKKVERTVTKAFNAMYAQDAKKGGRRARK

SEQ ID NO: 35687 - protein, 533 aa, Blastocladiella emersonii
MARSPATLLVRAAAFAVLLLALLAALVPAAARADDAAKDAAKDSKAANNYGPVIGIDLGTTYSCVAIYENGRVEIIANEQGHRITPSYVAFTDEERLVGDAAKNQAAANPENTIYDAKRLIGRTWDDKMLQQDIKHFPFKVVQKDGKPFIQVDVKAGQTKEFAPEEVSAMVLTKMKEIAESYLGRKVSHAVVTVPAYFNDAQRQATKDAGRIAGLNVLRMINEPTAAAIAYGLDRVEGERNVLVFDLGGGTFDVSLLSIDKGVFEVLATSGDTHLGGEDFDQRLVDYFAKLYKRKTKKDCHKDLKAMGKLKREAEKAKRALSSQMSVRIEIEAFHDGDDFSETLTRAKFEELNLDLFKKTIRPVERVLKDAGLKKAEVEDVVLVGGSTRIPKVQQLLQDFFNGKAPSKSINPDEAVAYGAAVQGGILAGEQSFSDMILIDVNPLTLGIETTGGIMTKLIPRGTVVPTKKSQIFSTAADNQQTVLIQVYEGERSLTKDNNKLGAFELTNIPAAPRGVPQIEVTFEIDVDGILKV

SEQ ID NO: 35688 - protein, 654 aa, Blastocladiella emersonii
MLSLTRSAAVRKSLLQARYASTKPTGAVIGIDLGTTNSCVAVMEGKEPRVIENAEGTRTTPSVVAFAKDGELLVGNAAKRQAVVNPANTLFAIKRLIGRKYTDKIVQDDAKHVPYKIVAHKNGDAWVEARGKQYSPSQIGAFVLMKMKETAEAYLGKSVKDAVVTVPAYFNDAQRQATKDAGSIAGLTVHRVINEPTAAALAYGMDKNADDKVIAVYDLGGGTFDISILEMQKGVFEVKSTNGDTHLGGEDFDNYLIKWVVEEFKKEEGVDISGDRMAIQRVREACEKAKIELSSTMQTDINLPFITADATGPKHINYKLTRSKFEQLTKDLIDRTVEPCKKALRDAQVSTKQIDEVILVGGMSRMPKVQTMVKELFGRDPSKGVNPDEAVAIGASIQGGVLAGDVTDLLLLDVTPLSLGIETLGGVFTRLINRNTTIPTKKSQVFSTAADGQTQVEIRVFQGERELVRDNKLLGNFQLGGLPPAPKGVPQIEVTFDIDADGIVNVSASDKATNKDTSITIAGQSGLSKDEIESMVADAEQHKESDAARRESIEERNRAESIIADTEKSMDEYKDHINKEEAEKIKTQITALRETMGKDGITADQIRQAYHDVQQASLKLFEAAYKARASNSSSSSDSSSSTSEAEFKDADKKN

SEQ ID NO: 35689 - protein, 659 aa, Phaeodactylum tricornutum
MMFMRIAVAALALLAAPSIRAEEAGEEAKMGTVIGIDLGTTYSCVGVFKNGALEIIANDQGNRITPSYVAFMPSGERLVGDAAKNQATINPENTVFDVKRLIGRKYSDKSVQADKKLVPYEIISDKDKPMIEVIQNEKTFKFAPKEVSAMVLQKMKLTAETFLGKEIKHAVVTVPAYFNDAQRQATKDAGTIAGLKVERIINEPTAAAIAYGMDKTGGESNVLVFDLGGGTFDVTLLTIDNGVFEVLATNGDTHLGGEDFDQRVMQYFIKMMKKKSDVDISKDKRALQKLRKEVERVKRALSSQQQARLEIEDLAEGFDLSETLTRARFEELNNDLFKKTMGPVARVMEDADLSKSEIDEIVLVGGSTRIPKVQQLISEYFGGKEPSKGINPDEAVAYGAAVQGGILSGEGGDATSEILLLDVTPLSQGIETVGGVMTKLINRGTTIPTKKSQTFSTHQDNQNVVLIQVYEGERSMTKDNHNLGKFELTGIPPAPRGVPQIEVTFEVDANGILQVSAEDKGTGKAEKITITAEKGRLSEEEIERMVREAEEFAEEDKKVKERIDARNGLESYLYNLKNTLDDDEKGLADNLSAEDKKELQDMIDETLDWMDGNPEADKEDYDEKLKEVEQVANPIMRNVYSGGAGGGAEDDADFADDEL

SEQ ID NO: 35690 - protein, 488 aa, Artemisia annua
MALSLTTSIALATILLFVYKFATRSKSTKKSLPEPWRLPIIGHMHHLIGTTPHRGVRDLARKYGSLMHLQLGEVPTIVVSSPKWAKEILTTYDITFANRPETLTGEIVLYHNTDVVLAPYGEYWRQLRKICTLELLSVKKVKSFQSLREEECWNLVQEIKASGSGRPVNLSENVFKLIATILSRAAFGKGIKDQKELTEIVKEILRQTGGFDVADIFPSKKFLHHLSGKRARLTSLRKKIDNLIDNLVAEHTVNTSSKTNETLLDVLLRLKDSAEFPLTSDNIKAIILDMFGAGTDTSSSTIEWAISELIKCPKAMEKVQAELRKALNGKEKIHEEDIQELSYLNMVIKETLRLHPPLPLVLPRECRQPVNLAGYNIPNKTKLIVNVFAINRDPEYWKDAEAFIPERFENSSATVMGAEYEYLPFGAGRRMCPGAALGLANVQLPLANILYHFNWKLPNGVSYDQIDMTESSGATMQRKTELLLVPSF

SEQ ID NO: 35691 - protein, 433 aa, Candidatus Pelagibacter ubique HTCC1002
MIKIIKKISVPLISLFFLINMSSAGIAETTISAEVGFVFNTLLFLICGFLVMFMAAGFAMLESGMVTSKSVSVICAKNIGLYAISGIMFWLVGYNLAYGIPEGGYIGTFTPWSDSSSLEAGYSAGSDWFFQMVFCATTVSICSGAMAERIKLWPFFLFAAILSGVIYPIVMGWQWGGGWLATIGFSDFAGSTLVHSTGGAAALAGIIILGPRFGRFDSKGNPKAIQPFAASSIPLVTIGVFVLWLGWFGFNGGSQLALGSFADAVAISTIFINTNLAACGGVLAAAVVTRLLFGKTDVIQMLNGAIGGLVAITAEPLAPSPLAAILIGAVGGVIVVFGTKLLFSFKLDDVVGAIPAHMFAGIFGTLVVPITNADATFGAQLIGVLSINIFVFVVAYIVWSIMNSLFGIRLSKEAQAKGTDVTETGVIAYAIRD

SEQ ID NO: 35692 - protein, 482 aa, Candidatus Pelagibacter ubique HTCC1002
MDKTYFISQSTSLTLVITISLIFTIVGLIYSKKYQGINNYLTANRNIGFFSLTTSLIASALGAWILFGPASAATWGGIGAVIGYALGTAFPMIFLISLGKKIRTDFPKGSTLIEFLRKRFGKSLFKLILLMTVFYMFVFLCAEVTAVAILINYISGTELWVTSLIILIATLAYTLYGGLRASIFTDNIQMIVIVALLLISVFYLTSFKGDQFSFSFIKEKSPHLLSVSYIPNYTAGLTFFIAVAATNLFHQGNWQRVYAAKNNEVLKKSLIVAFIVIIPIVFFMGFSGLVAVSANPKVIPDLGFFSLLLSEQTEFLSLIIVILGLSLTISTVDTLVNAISSLIVVDGKATLNLNKKTNYLTFSKYFIVVLSIIAFIIASKGFSVLYLFLLADLFCCAFVLTVFYSFYNKKLNEKTAYISIIIGLIGGFLLFPAPDFSKSLLVGIILPADTFPAFVSQSLLFLSFIIATFLPVIFWKIKGSKK

SEQ ID NO: 35693 - protein, 284 aa, Candidatus Pelagibacter ubique HTCC1002
MKNVGFIGVGYMGYGIAKNILKNKNNLFVIANKNRSPIEKIVSEGAVEVKSYDELCSKDLDCLFLCVTNTPIAHSIIEKILPLLNSDTLIIDITTHDQNGSIEANKIFKSKNINYIECPVMGGPVQAEEGVLGGIIGGSEENFKKAEVFLKAFCKDYFYFGEVGMGTKSKLLNNFLTLGNATLIVHMIKGAKKFDIDLKKLYDVAKLGSGNSAALSRIFDNLLKDDYTGFKFTAKNSHKDMSYIQDLLKDMPDAEKLAKDTKDFYKDALDSGNGELFISELIKK

SEQ ID NO: 35694 - protein, 370 aa, Candidatus Pelagibacter ubique HTCC1002
MKIGVPKEIKPQEHRIGLTPESVKTLISEGHEVLVENNGGFEAGFENDQYTSVGAKIVDKAEDIFNDADIIVKVKEPQAGEVKMIRENQIVYTYLHLAAAKELTEGLVKSKGVCIAYETVTDDNGRLPLLAPMSAVAGRMSVQAGAHCLEKNQNGRGLLLGGAPGVEGGTVVILGGGVVGENAAVIATGMGAKVHIVDKSEARLKQLVEMFGDKIIPEQSDKIDLNKLVAKADLLIGGVLIPGAEAPKLITKPMLKLMQRGSVIVDVAIDQGGCVETSKPTTHGDPTYIIDDVIHYCVANMPGGVPRTSTIALNNATLPHLVKIANNGYAKALSDDKHLLAGLNVCKGQVTYKAVADVFGYDYVDPLKTL

SEQ ID NO: 35695 - protein, 289 aa, Candidatus Pelagibacter ubique HTCC1002
MQNISFIGIGLMGFPMAKNLLKSGFNLRAYNRSQDKADRLKEFGAEISTSIKDVVTNSDVIITMLTDDAAVEKVMGSDEFISNIKEGATVIDMSSVNPVITKKYFKILKEKNINYLDAPVSGGTIGAEEASLAIMVGGDEETFKQCYDLLKILGNPTLVGPVSSGQISKLANQIIVGVTIGAVAEAVTLCEKSGTNPNKMIEALSGGWADSKILQTHGKRMINKDFTPKGKTTTQLKDMTNIINAGKAAETHLPISSLVKEMYKDLVADGQGNTDHSSLYKAIEKINKK

SEQ ID NO: 35696 - protein, 244 aa, Candidatus Pelagibacter ubique HTCC1002
MLTIKNLKANIDNKEILKGLNLEIKPGEVHAIMGPNGSGKSTLSNVLSGKKGYTVTGEVKYFNENLLELEIEERAHKGIFLAFQYPLEIPGVNTNIFLKTSLNAIKKAKGKKELDAIEFLKLVKQKAGELKFDEKILSRQLNVGFSGGEKKKNEILQMSILNPKLSILDETDSGLDIDALKIVSEGVNALRSKDSSFLIITHYQRLLDYIKPDFVHVLINGQIVKSGGSELAMELESKGYETLS

SEQ ID NO: 35697 - protein, 323 aa, Candidatus Pelagibacter ubique HTCC1002
MKKKNYKKIAKSVIDLEIKALKKLKNSINNSFSEAVESLANCQSKVILCGVGKSGLIAAKISATLSSVGTPSFSLSANDCSHGDLGSISKKDVLILISYSGSTEELKNIIKYANRNKITLIGIMSKKNSILYKASDIKLLIPEVTEAGLGIVPTSSTINQLSIGDALAVAVLNKKNINKKDFKKFHPSGNLGAQLRTVEELMITGNKIPFVNESLNMKKALQIISNKKLGTLIVQNNKKITTGIITDGQIRRVNAMSNNLQDLSVKKVMTKNPISINLDTLAEKALSIMNAKKITSLCVHKDKNKKKTVGILHIHNILHSNIR

SEQ ID NO: 35698 - protein, 558 aa, Candidatus Pelagibacter ubique HTCC1002
MDTRNVIAAISLSAAVIILYSLFFQPDPATIKKNLAEQNKIENNEDTPSLDKNENFSKLSRADALKENDRIQFENGSVVGSISLKGAAIDDLTFKEYNIELNRNEKITLLSPRNVEDGYLIESGFVSTNKNIDIPDASTVWEVSGNNKLTNNNPVKLTWSNTQGITFEKHISLDDQFLFTVKEKIINSSDKSYNFYSYGQIIRNEIPEISGFYILHEGFLSVLDDELIEEDYDDIQDKKFTQIAQDGFVAISDKFWVTSVIPPKGKEFKTTFDYKNKFRANYISTKGIEVKANSSIEEKIQIIVAAKRVNVIDGYAENLNINKFDLAIDWGFMYFITKPLFFVLDYFFKLLGNYGLAIIAVTICIRLAFFPLANFSFKSMGKMKLLAPEMARLKELHKDDKMKLQQAMMALYKKEKVNPMSGCLPILVQIPVFFALYKVLFVTIEMRHMPFYGWIHDLSDRDPTSLFNVFGLIPWDPPSFLLIGAWPIIMGITMWIQQKLNPTPPDPIQAKIFMFFPVFLTVILAPFPAGLVIYWSFNNIFTMIQQYIVQRKMTIKTT

SEQ ID NO: 35699 - protein, 1501 aa, Candidatus Pelagibacter ubique HTCC1002
MKNYKKNLKILEDGHVYSKEMEHDACGVGLIASTEGKKSRKVVEYGINALKAVWHRGAVDADGKTGDGAGIHLEIPSDFFAEKIEITGHDHDGSEICVGMIFLPRNNYQAQENARTLVESELTKSNFSIYGWRQVPVNPKVLGEKANLTRPEITQVLFKHNNKDLTEKELERKIYESRRKIEKEAIKDAIEGFYICSLSSKSVIYKGMFLAESIADFYLDLKDERFISRFAIFHQRFSTNTAPSWDLAQPFRALAHNGEINTFKGNTNWMKVHEQEMNSPLFDNMENLKPVIQPGSSDSAALDSVFELLNISGQSAPLAKLMLIPDAWSKKSQTLSKDHQQLFNFLNSTMEPWDGPAAIAATDNEWAIVAADRNGLRPMRYTISKDKILCAGSETGMVEIDEKQILKKGRLGPGEILGVRIAKGKVFSNVEIKDYLAKEFKHFNNQIIDLEKKFPIKNEKSTFSGDELKKRQHTFGYSLEDLELILHPMAEDAKEAIGSMGDDTPLAVLSDRYRPLYHFFRQNFSQVTNPPIDSLRENKVMSLKTRFGNLGNILDFTNLTEENIYVLDSPILSNSQLEKFINFFGEKSITIDCTFDKSENLETSIERIRKESEIAVRQGLTQLVLSDKNISEKRLPIPMLLCVGAINTYLIKKKLRGYASINAQTGEALDTHSFATLIGVGATTVNPYLALDSLYQRFEKKLFGKFEYDECIDRYIQSVNYGLLKIMSKMGISVISSYRGGCNFETVGLSRTVASEYFPGILSKISGIGLNGIEKKLRTIHKEAFEGTDVVLPIGGIYRYRKDGEIHQYQGKLIHLLQSAVSSNSFEAYKKYAEGIYNLPPIHLRDLIGFRDKNLNPSLDISEVEPIENILTRFGSGSMSHGALSKEAHETLAIGMNRIKGASCSGEGGEDEKRFIKMENGDSANSRVKQIASARFGVTLKYLNNCNEIEIKIAQGAKPGEGGQLPGFKVTEEIAKLRHSTPGVTLISPPPHHDIYSIEDLAQLIYDLKQANPKARVGVKLVASSGIGTIAAGVAKAKADIILISGHNGGTGATPQTSVKYVGIPWEMGLTEANQVLTLNNLRHKVTLRTDGGIKTGRDVVIAAMMGAEEYGVATTALVAMGCIMVRQCHSNTCPVGVCTQDEKLREKFSGTPEKVVNLFKFIAEEVREILAQIGFKSLNEIIGRTDLLRQVSKASPNLDDLDLNPLFVQTDAGENTRYCTVPEINSVPDTLDQEILPEIKEQIGKVKIIEKEYIIKNTHRTVGTRISNHLYEKYGSEKLDDGFLSLKFKGSAGQSFGAFAIKGLKLILKGDANDYVGKGLSGATVVVKLPDESNLVSHENTIIGNTVLYGATSGKLFAAGQAGERYAVRNSGSISVIEGCDSNACEYMTGGTVVILGDVGDNFGAGMTGGMAFIYDINKKFYKKVNPETVVWQTPETDYWITYLKNLVQEHHQETNSDFSKKIIENFDREISNFIQVCPKEMIDKLKNPISLKSIIKEVS

SEQ ID NO: 35700 - protein, 395 aa, Candidatus Pelagibacter ubique HTCC1002
MSKKSNDVVITAALRTPIGTYKGSLKGLSADKLGALAIKEAVYKSKLKSDDIDEVIMGHVLTSGLGQNPARQASIHAGIPVSKPAHIINQVCGSGLRSVISGYQSIKLQENKIIVAGGQENMSRAPHAIFYREDKKLDENKLVDTMINDGLIDSFNNYHMGITAENVAEKYKISRDEQDLFALNSQEKTQKATNENRFKNELIKLKINTDDKNFLFEKDEHPRNNLNLEDLKKLNTVFKENGTVTAGNSSGINDGAAATILMSREEAELRGIEPLAKVVSWATCGVEPSLMGLGPIKAVNLALEKAEWKREDIDLFEINEAFAAQSIAVIRDLKIRKEIVNVNGGAIALGHPIGASGTRILVTLIHEMIRQNKSKGCATLCIGGGMGIAMCIERN

SEQ ID NO: 35701 - protein, 762 aa, Candidatus Pelagibacter ubique HTCC1002
MKKTKIDHYTDKEALEFHSLNKPGKIEINSSKPMTTKRDLALAYSPGVAVPVQAIADDPETAYDYTSKGNLVAVISNGSAILGMGNLGALASKPVMEGKAVLFKRFADIDSIDLEIDSQDSDEIINSIKNFACSFGGINLEDIAAPDCFIIEEKLKEILDIPVFHDDQHGTAIITTAALINALDISGKSIKDIKVVVNGAGASAIACTNLFKNSGVPSENVIMLDRKGVVYRGRTEGMDQWKSAHAVETKKRTLEEAINGADVFLGLSAKGALKKELVKTMAKNPIIFACANPDPEITPEEIMEVRDDAIIATGRSDYPNQVNNLIGFPYIFRGALDVRATTINEEMKVAAANAIAKLAREDVPDEVVAAMGGDRPKYGKDYIIPSTFDPRLISVIPAAVAKAAMDSGVAKKPIKDFEAYRDQLKQRLDPSVTIMQGINSHIKKNQKRIVFADGEDENTLKAAIAFKNSKLGTPILIGKKNKIKERIKEIGYNENFDIEIINSEDTTKREKYVNFLFEKLQREKGLLERDCDRLVRNDRVIWASCMVACGDADGAVTGNTRRFGASFDKVTQVVDARPGEIMFGLNMVVAKGKTIFVGDTSVNEYPSSEELAEIAISSARVVKMFGFVPKVAFVSHSTFGQPLTSRTKHIKKAVEILKDKNVDFDFDGDMQPDVALNEEYKELYPFSSIVGNANILIMPGQHSAAISYKMMKSLGDTKVIGPLLIGLGQPIEIAPLRSSTSEIINLASVAAYSADVIDYKKS

SEQ ID NO: 35702 - protein, 602 aa, Candidatus Pelagibacter ubique HTCC1002
MIKGKFIDNLPKVYGIYTGGFIGFIILMAIGEQMGMTAKAIGVAFVAFTIFIYALIGYLSRTAQADAYYVAGRQVPTVFNGMATAADWMSGASFVAMAGGIYFKGYGYMALLVGWTGGYILVATLLAPYLRKFGCYTVPDFVGTRYGGNLARLCAVIVLTVASFTYVTAQINATGTIASVALDIDFKYAVYIGLISILLCSMLGGMRAVTWTQVAQYIVLIIAYLLPIFWISNKMGAGFFPHFMLADEVARIGELEQQFGFVKNSAADLATVPKGLAGITKAHSAVNATPWAFISLALAMMMGTASLPHVMMRYFTTPSVKAARKSVGWSLFFIFLLYSSAPMLATLSKLSLIDPTLPTGIIGKSFAEVQSIDWFQNWNQANLMFISDFNGNGTLELNEFFMGGKAVVLATPEIAGLPYVISGLVAAGGMAAAMSTADGLILAIANAISHDVYYKMIDPKAETAKRLLVARVLLVIIGFAGATIAAMEIQGILGSVIWAFDFAMSGLFFPLVLGVWWKRANREGAIAGMVLGLGSAIWYLVWVRNGGSGFFGLTQLTFGIFGAAVSFVSMVVVSLMTQEPDKTIQKMVDEVRIPSGKTVTGK

SEQ ID NO: 35703 - protein, 395 aa, Candidatus Pelagibacter ubique HTCC1002
MKSKKKIVLAYSGGLDTSIILKWLQENYDAEVICYTADVGQEIDRKKIIKNAKRLGVKNIIIENLKDTFVKDYVFPMIRGHAIYEGVYLLGTSIARPLIAKRQIAAAKKFGAYAVSHGSTGKGNDQVRFELGYHYFGPKVKIIAPWRIWKLNSRTDLIKYAKKNNIPIPTDKKGAPPFSIDDNLYHTSTEGKVLENPKNSAPEFLFQRTVSPEKAPNKASFVTIGFKNGDPITVNGKKLSPGSLLEKLNDVAGKNGIGRVDLVENRFIGIKSRGVYETPGGTLLMSAHRAIESVTLDKETMHKKDEIMPKYAELIYNGYWYSKARFKLQKIVDLKKNKVKGSVKLKLYKGNITIMSRQTKSSAYSMKKVSFEENKTFNKSNVERFINFHKKKLRS

SEQ ID NO: 35704 - protein, 387 aa, Candidatus Pelagibacter ubique HTCC1002
MKLAKNLQRLGTESAFSVLAEAKKLEAQGKPMIHLGLGQPDFKTPQHVVDAAKKALDEGHHGYVLSNGILECRQAVTRKIKKLYNKDIDPERVLIMPGGKPTMYYAIQCFGEPGAEIIHPTPAFPIYESMINYTGSTPVPYDLTEDKDLKFDPEKILSLITDKTRLLILINPNNPTGSFVEKSAIDVLAEGLKKHPHVAILSDEIYSRQIYDGKEMPTFFNYPDLQDRLIVLDGWSKAYAMTGWRMGWSVWPEELIPHVNKLIINSVSCVNAPSQFAGIAALDGPDDAIHEMMVKFDQRRKLIHEGLNSLPGVECSLPGGAFYAFPKVIGTGMNGSEFAKKCMHEAGVAIVPGTAFGKTCQDYVRFSFAASQDNISNALENIKKMLG

SEQ ID NO: 35705 - protein, 317 aa, Candidatus Pelagibacter ubique HTCC1002
MKKILITRRLLKESEDKASKMFDAKFNGNDELYSQSKLIELSEGHDAILTSLTDKMDEETINKLPDSIKVISNFAVGFGNIDLEAAKKRGIAVTNTPEVLSDATAEIGILLILGACRRVPEGIQAAKESSWKWSADYLIGKQLTGTRLGILGMGRIGQKIAKIAKSLGMIIHYHNRSKLSDEKEQGAIYHDSIKSLFGVSDVLSICCPATKETENLINKETLEYFPTGAVITNVARGDIVEDEALIDALNRRKIYAAGLDVYKGEPNLNSGYLKIKSVFILPHLGSATKHTRIAMANLAIDNIDEFFKTGNCKNKVN

SEQ ID NO: 35706 - protein, 582 aa, Candidatus Pelagibacter ubique HTCC1002
MENFKLLKIEDSLKNSLEKMKFTKPTPIQAMAIPVALEGKDILGTAQTGTGKTLAFSIPLINKLILDKNAFALVMCPTRELATQVMAAIKSIISDKINIKTALLIGGEAMQKQLRQLGNRSRIIVGTPGRINDHLKRKSLNLSATKYLVLDETDRMLDMGFTPQIELILKFVPKDHQTLLFSATLPQNIVRISERYLNKPQRISTGSTSVPIAKIKQETLQVFKENKYDQLVDQFIARKGSILVFVKTKRGADKMVKRLKEEGHSADAIHGDLRQSKRDRVITSFRKGLKRILIATDVAARGLDIPLIQHVINFDLPQVPEDYVHRIGRTARAGTEGSALTFLTPDDRSMWNEISKLIDPNFKPAPRGARGDSRGGKRGKAPYNKKRKFRDEKKSFGKGRPDRSSRDGEKKSFGYKGKSSFGDKSKPSSYGRSSSSSRDGEKKSFGYKGKSSFGDKSKPSSYGRSSSSSRDGEKKSFGYKGKSSFGDKSKPSSYGRSSSSSRDGEKKSFGYKGKSSFTKKDNSKPTGFTNNPKYFGKKTSESSSTSGEKKSSSFDGKKKFKSRSDRPKSFTFKKHSQKRAKV

SEQ ID NO: 35707 - protein, 512 aa, Candidatus Pelagibacter ubique HTCC1002
MDKPTIADNKPKKVELVQNEEYMFCTCGKSKNQPFCDWSHAGTSFEPINFKAEETGDAYLCMCKHSSTKPYCDGTHKNFTSDQINKSEEVSGTNETKSTEEEPHLAYIHELAKNGLTKLGHHGEMGAMGVPSKDLPKWEDIQILTAQLAKKPFLDNDKVETDIIIGKNSNKPLTLKIPIFVSDMSFGALSEEAKIALAKGAEGAGTGICSGEGGMLLEEQKNNSKYFYELASAKFGYSEDKLKNIQAFHFKGGQAAKTGTGGHLPGNKVKGKISEVRQIPEGEDAISPSTFKDLTTVDDFLKFSNRVRELTGGIPIGFKLSAQHIEDDIEFAVSASADYIILDGRGGGTGAAPLIFRDNISVPTIPALARARNYLDKKGYDHVSLIVTGGLRTSADFVKALALGADGIAISNSAMQAIGCVGARMCNTNNCPAGIATQRPELRKKLNIDESSARLTRFFNASVDLMKILARACGHDHLNKLSINDLTTWKKEMSELSGVSFGGIINNKQNNK

SEQ ID NO: 35708 - protein, 399 aa, Candidatus Pelagibacter ubique HTCC1002
MSIISDSLKKIKPSPTIAVTQKARELKAAGKDVIGLGAGEPDFDTPDNIKQAAIKAINDGDTKYTAVDGTAALKDAIVKKFKRENNLDYTTDQITVGAGGKHVIYNAMMATLNEGDEVIVPAPYWVSYPDMVLLAGGTPIILECNEKQGFKINPAKLEKSITPKTKWIILNSPSNPTGACYTESDIKEIAYVLANHPHVHILSDDIYEHVTYEGFKFFTIAQIDGLKERVLTMNGVSKAYSMTGWRIGYAAGPKDIIKAIAKIQSQSTTNPSSISQAAAVEALNGTQDFIKERATSFQERRNFVVKALNGIDGIECLNPDGAFYVFPSCKGLMGKKDTSGKELKTDTDFVQSLLENSGVAVVQGSAFGLEGFFRISYATSMDNLKKALEKISTFCKSLN

SEQ ID NO: 35709 - protein, 745 aa, Candidatus Pelagibacter ubique HTCC1002
MTAADTQILLNKLQSNINQLELTNKGALNALEFRLDAILQANLDTFWLLICAILVFLMQAGFMCLETGLSRNKNSINVALKNVSDFGISVVVFWAFGFALMYGTSVSGLFGTKFFFFTTKVAGYQTYFVFQAMFVATAATIISGAVAERLKFFSYIIITLLVSGLFYPIVGHWSWAFNFENPDQKFGWLGQLGYLDFAGASVVHSVGGWIALSVLLVVGNRTGRFREDDKKKSFQGSNTPMAALGALILWFGWFGFNGGANGAMDLKIPLILINTFLSASFGLIFSSVMGIIVLKKPEPLFMITGPLAGLVSITASCAYVDPTHAIIIGSIGGIISGSTIVLLEKIKIDDVVSAIPVHLACGIWGTIAVALFANFELMGVEKTRLEQIYIQLIGISSIGAFCFIGSYLILKTINSFFPLRVSKIHEELGLNISEHNASTDTHELLEVLTNQAKSDNYSSRAPQDPFTESGIIGTQYNVIMNKLEQSEKQKNKWKNRVSKEIKLAMNVQQRLMPKRDIENYPIFGLNIPAREISGDFYDFYLHDDEVYFTLSDVSGKGVNAGMVMAKAITLFKIFAKQKFKPNEILLEMNNDLKETNPVGTFITSIVGRYNLKTDLVEIANAGHQPTLLKVGKDFKEYPSSSMPLAVIKHKDESVYQLESFKLNGGRIYCFTDGFSECMDENKQEIGIDGVKELILKHTNSSLQKELTSATEEIRLKSLKKEIVEDGVKKDNDILDDDLTIIAIGK

SEQ ID NO: 35710 - protein, 588 aa, Candidatus Pelagibacter ubique HTCC1002
MPKLYSGAEIVFKCLEDQKVEHIFGYPGGAVLPIYDELKNHPTIKHILVRHEQGAGHAAEGYARSTGKPGVVLVTSGPGATNVVTALTDAYMDSVPLVCISGQVPTHLIGTDAFQECDTTGITRPCTKHNWLVKDINDLPRIMHEAFEVATTGRPGPVLVDIPKDIQFAKTKYSKQNKDKKVVTKNLNRFNQKDIDQLIDLMSKSKKPIFYTGGGVINSGPKASELLRELVSLTGFPITSTLQGLGAYPGNDNQFLGMLGMHGTYEANNAMHDCDLLINIGARFDDRITGKIDEFSPKSKKVHIDIDPSSINKIVKVDLSIVGDVSDVISSTTKTLKKKKLNLEKSNKQKISNWWLQIEKWRTKQSLSFVNSDTIIKPQYAVQRLYELTKNSDTYITTEVGQHQMWAAQHYKFDKPNRWMTSGGLGTMGYGLPAAIGVQVAHPKKLVVDIAGEASILMNMQEISTAVQYNLPIKIFILNNQYMGMVRQWQELLHEKNYSESYSKALPDFVKLAEAYGCVGIRAKDPSELDEKIEEMINTDRPVIFDCLVDQGENCFPMIPSGKPHNQMLLGPKDQDANKITGKGKALV

SEQ ID NO: 35711 - protein, 319 aa, Candidatus Pelagibacter ubique HTCC1002
MKKERNKNPIQPVSGTKVPRFAGPSTFARLPELRDVESCDVAIVGIPFDAGTSYRPGARFGPMSIRQASRHLRTNYHPSYDVEPFKVQQVADAGDITCNPFSIDESIKQIETGATDLLNKVGGIISLGGDHTIAVPLLRAINKKCNGPVALVHFDAHLDTWDTYFGAPYTHGTPFRRAREEGLFLDDASMHVGIRGPLYSRDDIKNDEEFGFKIIHCDEFQTQGTDKIAERIKKRVGNNPLYLSIDIDVLDPAFAPGTGTPEIAGMTTREMVNVLRGLSGLNLVSADVVEVSPAYDHAEVTSLAAATIVYELTNLFAKS

SEQ ID NO: 35712 - protein, 418 aa, Candidatus Pelagibacter ubique HTCC1002
MKNTMVIPLVTVTWFFFGWWIYWAFPTGPGIAPSIMNESSALITDESTFSAKWYVANTEFMAVNLGDRISGVFWAAFLLFSWTAASIVSGAIIERITTFAFGILAIAIGSCFWVIDAAWGWHFDGWMLKILGYHDAYASGVIHAIAGGFALGVLIVLGPRIGKFSSSGEPRNIGPRNPWLVTVGLFLIYTGFWGFYAACNIPIFDLGPEYGMEGVTYWTATNIYVTPTTLSGITYNFLMSLSGGLLAGYVVAKGDPFWTYSSGLAGIICASAGNDLYHPIQAMLIGAIGVVISYKMHYWVERKFKIDDAVGAVAVHGYAGVVGLIICGFVLNGYPSSGYSVGAMWDGSTYASINPLGQFLGAIIMFGVLGMLPGYVLARILSAFGKLRIPREVEIAGLDYEIMEDDREAEKAVASATR

SEQ ID NO: 35713 - protein, 288 aa, Candidatus Pelagibacter ubique HTCC1002
MSNVAFIGLGVMGYPMAGYISKAGHNVTVYNRTAAKADKWVAEYKGSKADTPAKATEGADFIFTCVGNDNDLREVTFGDNGIFKTIKKGSVYIDNTTASATIAREIYEHSLKSEFGFLDAPVSGGQAGAENGALTVMIGGDQANFDKAKDIIDCYSKKMKLLGGAGNGQLAKMVNQICIAGLVQGLSEAINFGKKAGLNMEDVIEVISKGAAQSWQMENRYKTMIDDQFEFGFAVDWMRKDLKIAMDEAKNNGSQLPVTEIVDKYYGEVQEMGGNRWDTSSLIRRLSK

SEQ ID NO: 35714 - protein, 378 aa, Candidatus Pelagibacter ubique HTCC1002
MSIYLDCNATSPIEPEVVEKLTQYLTIDFGNEGSHTHEFGSTAKKAVQEARDNIVSLVDASRNEIIFTSGATESNNIAILGLKEFGIKNNKKHIITSTIEHKAVLEPIEELKKLGFEVDVLPVDKSGRVNPKDIQKKLKEETLLVSIMHVNNETGIIQPIEEICKVIENNDCFFHVDGAQGFGKEIDTLKNKRIDLISISGHKIYGPKGIGALITRLRNYNKPPLQPLFFGGGQESKLRPGTLPVHLIAGLGVAAKVAKRDLKKRQTKNKVIFDKIMDLIKNLKGELNGDTKHLLGNCINFSIPGVDAEAFMLMTKELISISNGSACTSSTYEPSHVIKSMTNNEDKIRGALRFSWCHLTDNKIPVEEIEKKLQNILY

SEQ ID NO: 35715 - protein, 433 aa, Methanococcoides burtonii DSM 6242
MNDVSSEKSIGYLSAVSIGIGGMVGGGIFAVLGLAVEIGKGGTPIAFGLAGIVALITSYSYAKLSVRYPSEGGTVEFLNQAFGSGLVTGGLNILLWLSYVVMLSLYAYAFGSYGSTFFPDSMQAVLRHVLTSIIIVSLTVVNIVGAKVVGKLETWIVGFKVAILLIFIGVGIWSVKSQPFQPTISSNPLQLVAGGMIIFLAYEGFELIANTAKDVKNPGKTLPCAYYSAVVFVIVLYVLIAFITVETVSIDSIIQAKDYALAVAAKPFLGNFGFNLIAVAALLSTASAINATLYGASRVSFTIAKDGELPEILEEKIWNRPIEGLLITSALTLIVANTFNLASISIMGSAGFLLIFGAVNASNACLYQKTASYRWISITGIIVCSIALFTLIWYTLNNSPKDIFILAFMLCSAFAIEAIYRRFTGRYIKKIHE

SEQ ID NO: 35716 - protein, 496 aa, Methanococcoides burtonii DSM 6242
MTEYRCNVCNVFEYDDTRGDSNTEMKPGTKPEDFPDDWRCPICGADKNHQMPAEKKEVEHVTSKEIVTCVKCGTKSKITVSALEDADVKSYLGEWKRTKDEFETFMEDIHKISITGESIIEPMRTKQDVISWNDILIKSAQLAKMPLNEDVTVNTTTTIGPHAKYPLVIETPVFITHMSFGALSKEVKQALSKGSAAVRTAMCSGEGGILKENMETAYKYIFEYVPNKYSVTEENLKKVDAIEIKIGQSAKPGMGGHLPAEKVTSELAEIRGFPESTDIVSPANFDDIRNKDDLKKKVEWLRETSGGKPIGIKIAAGNIEADLEVAIYAKPDFITIDGRPGATAAALKFVKNSTSIPTIFALWRARRYLDEKGIKDISLIITGGFRISPDYAKALALGADAIAIGTAALMACACQQYRLCDTGKCPVGVTTQDPELRSRLKIDISAKKLENFLKVSTKELEAFARLTGNDDVHKLGVKDLCTTNSEISGHTEIEHV

SEQ ID NO: 35717 - protein, 544 aa, Methanococcoides burtonii DSM 6242
MKGSELFVKCLENEGVKYIFGIPGEETLDLMESLSRSDIEFIVVRHEQSAAFMADVCGRLTGRPGVCLPTLGPGATNLMTGVADAHLDRAPLVAITGQGSLDRAYKESHQFLDVAGMFSRITSWNATVTAANQIPELIGKAFDIATDVPGAAHIELPEDVSTQETDALPLEKKEYSHSCSFDEKELHKAIELISGATKPLIIAGNGVIRENASLELEQFVDAANIGVVTTFMGKGAIPADNDHFIGSMGMSEKDYIICGLNAADVVIAIGFDSVEYSPDHWNMDHSKSIIHVQNRHPEIETSYIPECALLGTLKTTLRAMTSAVTPQEFPDHYRNIKASMEDELLRYKDDPTFPVKPQRILWEVRKKLDREDILVSDVGAHKLWIGRLYLALAPNTVLMSNGLASMGFGLPAGIAACLIHPEKKVVTIAGDAGILMNIQDLETAVRLNCDLVIIIFDDASYGLIEWESNTKFGESFGTSFKNPDFVGLANSFGAKGIRINSADGLGDALQSAFKEGGVWLIDVPVDYSENMKLTTILEGKYCTV

SEQ ID NO: 35718 - protein, 389 aa, Methanococcoides burtonii DSM 6242
MFNETIYLDNAASTRLDEEVLEAMKPYFFDAYAVATSEFGYSMGIDAKEGLERSRKVIASRLGAQAGEIVFTSGSTESSNMAIKGVLSALKGKKDDHLIVSRLEDFSVLNTAKKLDKQGYKVDFINVDGEGVLDIDMFTDTITSQTALVSIQQANQEIGTLQDLKAISDICEDKDVLLHTDATHSFTRVPLDVSKLPVDLVTMSAHTIHGPRGIGALYIREGTPIDKWMDGGFQESDRRAGVENIPSAVGFAKAVELVTPEENERLAAMRDRVIERAMSDISHVTLNGSATSRLPQNANMTFHYVEGESITLHLDMLGFAVSTGSACFSRSLEASHVILGIGGNHERAHGSLRFSFGRFNTIEDADAIIDALKDVVTNLRAISPLSEDN

SEQ ID NO: 35719 - protein, 530 aa, Methanococcoides burtonii DSM 6242
MAVNTSTLGIFVLVYLLAVFYCGWLAYKRTKDVEDYMLAGRKVNPYILALSYGAAFISTAAIIGFGGVTGTLGLGTLWLVFMNIFVGIFIAFVVFGARTRRIGLNLGAVTFPELIGRRFQSRFIQGYSGALIALFMPLYAGIVLIGGARFMETALSIDYNIAVLILIVIVAAYVITGGLLAVMYTDALQGTLMFVGMSILLVLTYTKLGGVVEAHQALTNLAPLVPESLAAGGHQGWTAMPVFGSPIWWTMVSTIILGVGIGVLAQPQLAVRFMTVDSKKSLNRAVFAGGPFILMMAGVAYIVGGLSNVHFFNTVGMISIDVAKGNLDLIMPEYINSAMPELFVIFFMITLLAAAMSTLSSQFHTMGTAIGHDFYREFLMKGNAGNTVTVTKFGIIVTIIFSVILAYILPISIIARATAIFFGLCAAAFLPMYIGALFWKRMTKEGAIASLVVGTFSSLFWLAFVHIKEAAPLGICKALFGTDTLLTGTWTVVDPILIAFPLATIAAVSVSLMTKQPSKEHLNTCYGKKF

SEQ ID NO: 35720 - protein, 380 aa, Methanococcoides burtonii DSM 6242
MPSSRLERVEESETIKIANAANKMKSEGIDIISFSLGEPDFNTPDHICKAAADAMYRGDTHYAPSTGIPELREAIANKLQTENKLEVTSDDVLVTPGAKQAIFEVMMSVLDDNDEAILSDPSWVSYSPCIKFAGANPVWAPTDPDNGFMPYGIEELITNKTKLIVVNSPCNPTGGVFDNEMLKTVADLAVDHDLLVLSDEIYEKIIYDKKHISMGSLDGMHERTITVNGFSKAYAMTGWRLGYVTAIPELMKGFKKIHSHSVSSATTFAQFGGVAALEGPQEPVNDMLKEFKARRDILINGLNTIGIKCKRPDGAFYAFADVSEFGDGDAVAEKLLQDAHVAVTPGSAFGLSGKDFVRISYATSQERIKQALQRIEETLL

SEQ ID NO: 35721 - protein, 468 aa, Methanococcoides burtonii DSM 6242
MEVRGEYEAIIYTGDTIHNVHSASEIQFISLNDAMIGFDSLKASSPLSSSSDKFELVGDIDIYNSDEFACEFHCGNVENMSILTRFLQDTFGLEKCSDDEMFQRFDSSLKAIRGVYAIACHIGDKVFLARDLIGVKSLWYDVSSGFAFASEKKFLEMAGLHEVVELDPRHILCYDFENDIIKSYDREFLQGLAEHQGSFVEIRNGFLSLLKEAVSKRVPDEDFGVMFSAGIDSTILALLCKGFAEAKGVKCNYYTVGLSGQVPSPDIACARKLADELELELNVHEIGLDTVEEYLSTVVPLIEDATVPKTGVALTMYAACRAAKEDGINVLFAGAGADELFAGYNRFKSSESVNEDCIRDIMEMHKVNTYRDDTVAAFTGTIVRYPYLDENFVEYALAIPKEYKISDEMNKIVLRKAGEELGLPKYVVERGKKAAQYGSSFDQALKKLAKRAGFANKTDYINSFQERR

SEQ ID NO: 35722 - protein, 249 aa, Methanococcoides burtonii DSM 6242
MLEIKDLTVEIGGRMILNKVNLKVEQGSTTVLFGPNGAGKSALLMTLMGFSGYDIVGGQILFKGEDITHLSVNERAERGLGIMTQRPPNLTGVKLKDLVKVISNDHNFDTETASKKLDMDRFMDRDVNVGFSGGEIKRSELLQLSAQNPCLYLLDEPESGVDLVSIEEIGTTIDGLLSSRSKCSVDHYKRENSALIITHTGQVLDYVEPDVGYILCNGTVMCRGNPREMLKEIKTHGYKECIKCKRATL

SEQ ID NO: 35723 - protein, 639 aa, Methanococcoides burtonii DSM 6242
MSEEYKWFLKDAVVDTGMCTLCGACAAVCPYEIIEFDENGPKLKEECYRNGEGACKDVCQRVMTDAARISMNVFNFKSLPPSLIGQYQKIVSARATDPSIAEKGQDGGAVTALLGYCFDNGLIDGAVTTAGFTKPDSCIVASKEELLDTQGAKYSAVPVMAALRQSKDELKNVAMVGVPCQTYGTRRTQFFTGLNVHPMEVGMNGEKADIPNIPYTIGLFCMENFNYEKLSEHMKSIGIDLDKIRKYAIRLDVMIVTTDDGEIEISLKDIADCVWDGCRICRDAVSKVADISAGHVGSSTGWTTLIARNDKGLELLEAAEKAGYIETVDDVDISMIEDFAAIKMRKFNKELDKRLDGGKKVNFYWVRDYPGVRPEANGTNFVKIKTNSGIVQHDYIARVAELAEKYGDGSLELTSRKSVEIQGVKGKNVDSLMADVYGSGLKTIGMGYANACPGMDYCPEGLVTTKDLANELTMQFAQKLTPHKMKIGVAGCPNSCVRAESNDIGIVGQLRPKVDTEKCTGCGRCSELCKLNAISVISGKAVIDRDLCINCGWCVRGCPHEAAVEDQKGYSVWIGGNDGRRPTNGVLLKTFCTKEEIPSLVDKVGKTFVKYRTKPGKERLGNIIELVGEGQFISEVLKE

SEQ ID NO: 35724 - protein, 563 aa, Methanococcoides burtonii DSM 6242
MTGKAERMTGARAFVECLYRENVEVIFGYPGGVLLHIYDELYDAHLHHLLVRHEQAAVHAAEGYARATGKVGVCLATSGPGATNLVTGIANAYMDSVPMVAFTGQVPSSMIGNDAFQEANITGITMPITKHNYLVQDVKDLPRIIKEAFHIASTGRPGPVLIDLPKDITTDEIDFVYPDTVELRGYKPTFKGNAQQIKRAAAVLKDAKRPVIYAGGGVIGSEGSKELLAFAEKLKAPVTTTLTGIGGFPNDNELYLGMPGMHGTKYANYAIQESDVLIAVGVRFDDRVTGKTTSFAPNATVIHIDIDPAEISKIIKVDVPIVGDAKQILGALLKHVSECDTKEWLDKIATWKRDFPLFYVNRDDVIKPQYILEQINEVCPDAIIVTEVGQHQMWAAQYFNYTEPRTFISSGGLGTMGYGFPAAIGAKIGRPDKVVFDVSGDGSFQMNSQEMATIVQNNIPIIIAIFNNGYLGMVRQWQALFFEHRYSHTTIENSVDFVKLAEAYGAMGIRVTKPSEVKAAIEKAVEANAPVLIDFIIEREENVSPMVPAGAAINEILDLEDIQ

SEQ ID NO: 35725 - protein, 456 aa, Methanococcoides burtonii DSM 6242
MSENSNEVDLVKSLRPYHVWALGVGIVLVGEYMGWNFTVAKGGILGSLFALLVAGTMYVMVSLCASELGSSTKLAGGPYDWARLFVGPGAAAIVGLAVYMEYIALEAADAIVVASIAQSIFPEIQTFPVTLLVIAALTFMNYRGVVAALNLNFALTFTALIAIIAFFFMNISGIGGTWHPEYLISGAIPNGFIGIFAALQFGPWFYLGIEGAAMCAEECKHPTRAIPLGQQAGMITLLLGSGMTLYVCSGLIPTAELGVSVYPLFEAANRSGVKFLIAFLAVGTLFTCLASANGTVCDSSRSWFALSRDHFLTNWFAAVHTKYSTPYRAVIFTMPIAVAFAYSGFLDQVITFSITSGLVCYVMIPFSLIRFRKMFPEHTQKVRPFVGPLQPYLAYFTILLAIVIMSTLNWGYSYNLIFGLVFYVVAYFYFSWRYRSIDAKHDWGEDLGWPEPAHKR

SEQ ID NO: 35726 - protein, 394 aa, Methanococcoides burtonii DSM 6242
MSKKVALAYSGGLDTSICIPLLKEEYGYDEVITVAVDVGQPKEDVAQAEEKAKKISDKHFTLDVREEFVNDYIFPLIRANGDYEGYVMGTSIARPLIAKKVVEIAEQEGAVALAHGCTGKGNDQLRFEAVFRLTDMDVIAPMREMNLTREWEIEYAKEHGIPVGVTTAKPWSVDENIWSRSIEGGKLEDPGYIPPEEIYKWTTAPEDAPDAQIIEIGFENGVPVSLDGQKMGGVELIEKMNIIAGTHGVGRTDMIEDRVLGLKARENYEHPAATVLLAAHKDLEKLVLTRAELKFKATVDAQWSELAYYGLVDEPLYDDLNAFIDKTQERVAGTVTMKLYKGSVLVLARTSPYALYSEELVSFDGTSIDQKDAEGFAKYHGFQARLYRKFVVKN

SEQ ID NO: 35727 - protein, 210 aa, Methanococcoides burtonii DSM 6242
MLFMAFQIVFAAIALAILTSGVAERIKLSSFIVFGLLWTTLVYDPLAYWAWGDGWVGSMGALDFAGGTVVHISSGFGALALSFVIGKRIGFGKYSMEPENITTTLLGGALLWFGWFAFNAGNALAANAFVVTLISASSGALTWMGASWIKGKSSSLGMNSGAIAGLVAITPACGFVGPLAAIIIGGSAGILCYGTLLFCIYKKFDESLDA

SEQ ID NO: 35728 - protein, 357 aa, Methanococcoides burtonii DSM 6242
MDVTHDMNGQKKWMQLPRNVVIGNGVINEVRDVCTDLKLIDNALVVTGKSTKGIAGEIVQDSLQDAGQNVELVISESASMKEVERIRKHAIESGTKYFLGVGSGKTIDVAKLAATDLEVPFISVPTAASHDGIVSSRASIKDGKTTTSVQANAPMAVIADTEIIANAPYRLLAAGCGDIISNCTAVLDWQLASRLQNVQFSEYAAALASMTAQILIDSADSIKPELESSVRMVVKALVSSGVAMSIAGSSRPASGSEHMFSHALDRVADEPALHGEQCGVGTILMMYLHGGDWKKISDALKLIGAPTTAKELGIEDKYILEALVLSHTIRPERYTILGTGLTPDAAEIVARKTKVIS

SEQ ID NO: 35729 - protein, 347 aa, Methanococcoides burtonii DSM 6242
MRVTKRDLKHNREGEISLTPETLDDLWHLKYIIEKGDLVFSLTKRKADNAADKLRPEKAEKKTVRLGVRVEDVEFHKFSNRLRVHGLIEHGMDAGFYHTLNIEDGTNLSITKYWKKDQLERVNEAEAASKRPKVILVAIEEGDADIGFVRHYGIEIYSHITQSSGKGEGTLREVFFSTILDQLTHAMSGTESVVVSGPGFTKDDFMKYASSKNSDLVAGILVEDTSSIGMSGFQEVLRRGAVDRIMEESRIARESSLMDSLLKEIALDGKVAYGMDEVKQAIDFGAVETLLVADEMLRLERESGNIDGLIQNVERSQGKMVVFSTEFEPGQRLHSLGGIAAILRFKV

SEQ ID NO: 35730 - protein, 634 aa, Methanococcoides burtonii DSM 6242
MCGICGYAGFDDEDLLGKMCDAIVHRGPDDSGSFTDKGIGLGHRRLSIIDLEGGHQPVCNEDGTIYVVYNGEIYNFLSLRDELEKRGHRFQTSSDTEVIVHLYEEYGKDLVHHLRGMFAFALWDSNTRTLLLARDRLGVKPLYYTTIDNRLLFASEIKSIVQYSGYEKAVDIGTLHDYLTFRHALGTETMFAGIKKLLPGHVMTYREGEVNISEYWDVPLVTVGNESEDFYIKKTRLLLEESVKMRLMSEVPLGIYLSGGIDSGIVTGLMSKMVDEPIETFSVGFGERGEIGELSQAQEAADFFGTNHHEIIVDQGAFKQNLKDIIWHNDEPIADPSALAMFQLSKMASKHVTVVLNGAGGDEVFGGYISYKVGLANQKYHKIVPKVIRQGLVRPFVNAISPHLSSKMYVGIQSATQEVEEHGFLFTKSVFSEEDKEDIYTDKIKDKIHHNTFEKATTSLFRGKRYSGAIDERSSAKNTDLLSKMMYADTKSYLVDHILLETDKLTMSSSIEARVPIIDHKVVEFAASIPQELKLRGMTEKYILKKVGQGMLPPAAQNRKKRPFRIPIDTWFKDELHEMSQQVLDESSIVEQGYFRPEVVKDIMKKHERAELLYNHQMYALLVFEMWHERFMKM

SEQ ID NO: 35731 - protein, 317 aa, Methanococcoides burtonii DSM 6242
MKVFVSTHPFSSTSQTPLELLKSNEIDVILNSHERKITTRELASDIGNSDVLIAGTERITEEVIKNAPNLKLISRVGVGLDGVNFELCNKYGIKVTYTPDAPTMAVAELCVGIILDLSRKISYTDRNVRKGVWDRYMGNLLYGKTVGIFGMGRIGKSLVHLLSSFNVKFLVNDITPDFSFGRLYNIEFVSKNDVLEKSDIISINIPLKKDTYDFITLNEIKKMRSNAILINTARGGIVNESDLYEALKNSMISGAGIDVFEEEPYKGKLTELGNCVLTCHVGASTINSRTEMETQAVEEVIRFKNERPLKNEVFANE

SEQ ID NO: 35732 - protein, 736 aa, Methanococcoides burtonii DSM 6242
MSEDITVRVAEANHRDAGRGIARLPNALMQTIDARSGDIIEIRNKKNTYARVYPAGLDDEGKNIIRIDGNLRGNARVGIDDPVTVKRILEKDAEKITLAPTHPVLNERISRSVHLSLEGRPVDKGQRIRVENINNPLIFVVKATKPHGPVVVTRTTKIEIVEPIAETDMGEEVSYEDIGGLKRELGLMREMIELPLRHPELFDKLGVDPPKGVLLYGPPGTGKTMIAKAVASESEANFIPISGPEIISKYYGESEQKLREIFEEAEKEGPTIIFIDELDSIAPKRDDVVGEVERRVVAQLLTLMDGLTSRGKVIVIAATNRPNSIDQALRRGGRFDREIEIGIPDRGGRLQVLYVHTRGMPIEQGLNLENIADITHGFVGADLASLCKEAAMHALRRMLPLISIEEEIPPEIMETLEVTETDFIEAHRNIEPSALREVFVEIPHVRWEDIGGLNKVKQELIEAVEWPLKYPEMFTALNTTPPRGILLFGPPGTGKTLLAKAVANESEANFISIKGPELLSKYVGESEKAVRETFRKAKQAAPTVVFFDELDSMVPKRGMGSDQQATERVVSQILTEIDGIEELKDIVIVAATNRPDIIDPALLRPGRFDRLIYVRPPDKEERAKILDIHLSGKPIAEDVKLEELAELTEGYVGADIEAICREAAMMTLREIIRPGMTKDEVYETVKNVVIQRSHFSTAIKRVRASTSLDEMKRYDETARMFSNPDADENKDLREKA

SEQ ID NO: 35733 - protein, 370 aa, Methanococcoides burtonii DSM 6242
MSGRGFAQRVLDIDISGIRKMFEAAGSDAVNLGLGQPDFDTPGHIRQAAIDAINEGFTGYTYGAGIVELREALSQKFREQNGFEVSPDGIIVTSGASEALEIAIAALIDPGDEIIISDPGFVSYNALAGFMGGKVVGVPLGDDLTMRPENVMESITPKTKAVIVNSPCNPTGGVLSKSDIKAYAEIADDNDITLISDEVYEHFLYEGEHVSPAKFTDNVITVNAFSKTYAMTGWRVGYTAASQEYTNQMLKVHQYVQACANSIAQKAALAATTGPQDFVYMMRDEFKSRRDVLVEGVNALGMECEAPKGAFYMFPKVENSTEVATKLVANGVVVVPGTAFGKNGDGYIRMSYATSMDEIKRALKIMEKVL

SEQ ID NO: 35734 - protein, 289 aa, Methanococcoides burtonii DSM 6242
MFYQPGMMDALADYDSASYVIFGVPFDRTSSFRAGSRWAPDAIRSATANFESYNSFYDIDISEIPAHDAGNFEAGALVDDVLDELYLDVINIVDDGKLPIMIGGEHSLTLPCMKACAKHAGEDFGVVVLDAHFDLRDEFEGMKYNHACVSRHILEEVTENYVSIGIRSGPKEEWDYAKENNVRYYTPEDVTEKGIKGLTNEIREYLDCENIYISLDMDALDPAFAPGVGTPEPFGLTSVQVRDIIREFAPIARGFDVMEISPEYDSGQTAILGAKYIREFIAAHAASIK

SEQ ID NO: 35735 - protein, 522 aa, Methanococcoides burtonii DSM 6242
MESFKKLGIEDAILRSIEDKKFEEPTEIQKMAIPLILEGKDIIGGAATGSGKTLAFGCGIIQKIEKGNGIRALVLTPTRELAEQVQNSLKEFSRHKQLRVAPIYGGVAINPQIRQLERADVVVATPGRLLDHIERGTIDLGDVEILVLDEADRMLDMGFIDDVEEIIDECPSDRQTMMFSATVSKDIQYLSSKYMNNPSKVFAKAYVDSDKLKQVYIDVPKKMKFSLLVHLLKSEKSGLVMVFCNTRSNVDFVQKNLRKNDIDAIAIHGGHTQAKRKSTLSKFHSSNAHALVCTDVAARGLDIPHVSHVYNFDIPDDPSEYVHRIGRTARAGREGKVINVVADVDKGGFTRLSKMHRNFKIEREDLPEFERVLIKSEDSGGRPTRGRREDRKGGRREDRKSAYGGRSSGGSSGGRSSDRSSGGSSGGRSSDRSSGGSSGGRSSDRSSGGSSGGRSSDRSSGGSSGGRSSDRSSGGSSGGRSSDRSSGGSSGGRSSDRSSGGSSGDKARTGFKKRTGVQRKRE

SEQ ID NO: 35736 - protein, 469 aa, Methanococcoides burtonii DSM 6242
MRYVMKFGGTSIADGKKIRHVAQLLIGYKEGGDQVVAITSALGGVTDGILTNAAEASQKGKVSQVKEFMAELAKKHYDAISDAIDNERIADEVIETIDIRIDELEKALIGICYLGELTPRSIDYISSYGERLAVPIISGSIRSMGIDSKPFTGGEAGINTTENYGNARPLKKSYAQIKEVVGPLVENSIPVVTGFIAEDKNGIITTLGRGGSDFTASLIGAAIQADEIWLWKEVHGIMTTDPKIVPEASTISQISYIEAMELSYFGAKVLHPRAIEPAIIHGIPVRVKNTFDTQFPGTLIVADQNCSEEVAKAVTLIRNVAAINICGAGMVGAIGTAAKIFTTLANAGVNIIMISQSSSEANMSLVIEQSHLKRAIKSLEHAFNEGVVGEVAYDEDVCVVAVVGAGMDGSPGVAGKIFGALGKEKINVIMISQGSSQHNISFVVKEEDAEEAVKVLHREFGLGKKNGCN

SEQ ID NO: 35737 - protein, 738 aa, Methanococcoides burtonii DSM 6242
MEELQIKVEKAHPIDFGRGIIRLDPSTLLSLQLSPGDIVEIVGKKKTAAKVWRADRQDWGQGIGRIDGFTRQNAGVGIGERIHIQRAEVLVAEKVVLAPPEGVMMEFGGNINAIIKHNILKRPFVVGDVIPITSSMTQTAPGNQAIPLVAIESEPEEGILIVSENTEIELRQKPVEGYEDTATGITYEDIGGLGDEIQRVREMIELPLKHHEIFQRLNVEPPKGVILYGPPGTGKTLIAKAVANESRANFLYVAGPEIMGRFYGESEERLRKIFEEAAENAPSIIFIDEIDSIAPKRENVTGEVERRVVAQLLTLMDGMEERGQIVVIAATNRLDSIDPALRRPGRFDREIEIGVPDSDDRLEVLQIHSRGMPLAEDVDLEHLATYTQGFVGADLLSLVQEASMRALRRILPEINLDEEEISQEVLEKLVVTAEDFEDALKEVEPSAMREVLVEIPSITWEDVGGLSDAKQEIIEAVEWPLKHPDRIIEMGIKAPKGILLYGPPGTGKTLIAQAVANEANANFISIKGPQMLSKFVGESEKAVRDTFKKARQVSPCIIFFDEIDSIATTRIADSETGRSSQQVVNQLLTELDGLEPLKEVVVIAATNRPDMIDPALMRSGRFDRLVLVGNSTIQGRESIFNIHTREMPLDSEVSIQSLAAMTEGYVGADIEAVCREAAMLALREDFDAESVKERHFLAAIEKVKPTITEDMAEFYSKIQDKLKGGTHKQETSSYMGYM

SEQ ID NO: 35738 - protein, 391 aa, Methanococcoides burtonii DSM 6242
MRTQCKPSQFIANRMQKVPPSGIRKFFDLVSDSEDVITLGVGEPDYVTPWHIREACIHSIEYGETSYTSNYGLMELREELSKHYTRRHNVYYEPETEILVTAGVSEGLDLAIRAIVNPGDEIIVVQPSYVAYVPAIIFAGGVPVTLGARPENDFKITADEIRAAITNKTKAVIINYPNNPTGATMDKSDLEAIADVIVEHNILMISDEVYERLTYEGTHTCFSSLEGMRDRTILLNGFSKAYAMTGFRMAYALAPKEIIDAMMLIHQYTMICAPITAQIGAIEALRNGEEEVEKMAREYNRRRKLIVGGLNKIGLDCFNPRGAFYAFPAISSTGLSADEFAERLLNEYKVVTIPGNIFGDTGDGFLRCAYAASREDIKEALDRIGNFVDGL

SEQ ID NO: 35739 - protein, 426 aa, Methanococcoides burtonii DSM 6242
MTETIDDEPRSNNYSFSGIGNGELVSKSDEDFSKYLLDRMKQLESRNNLLKEQYDQMESDKRYIESQKLKYERETHRLQSEIERLKSPPLVVASVVDIFDDDKALIRSSTGPQFLVNVSQDFEDDDLLVPGARVGLNQQTLAVVDIIPESDEPLITAMEVIDSQEVDYSQVGGLDQQIREISESVELPITKPEAFKRIGITPPKGVLLFGPPGTGKTLLAKAVAHRTNATFIRVVGSELVQKYIGDGAKLVRDIFEMARKKAPAIIFIDELDAIAATRLGDTNGADREVQRTLMQLLAEMDGFDNRGDVRIIAATNRPDVLDPAIVRPGRFDRIIEIPLPDQDGRETIFLIHMDMLNIGSDVDVKKLASLTEGASGADIGAIVMEAGMLAVRNDSDHIGMSDLLDAVTKVMVPKENNLDHSENMFW

SEQ ID NO: 35740 - protein, 319 aa, Methanococcoides burtonii DSM 6242
MLVAAVFLSGCTFAPDDGTLTEINIGYQPSTHQISYMTAFENGWWAEDLAPFGIMSINEFEFPTGTPEMHSMIAGNIDVAYVGAAPVISALSTGLDAKIVAAVNTQGSNLVLRNEFKYDGPADLEGLKIATFPPGTIQDTIFKEWLVDNGLEPGTDVEVVAMGPGDATAALAAGKVDGVFLPHPAPTFIEVEGSGRSVVASGEILADHACCVLVVSGDLIRNNPELVEQIVKTHIKAIEYDNLNIDDAANTFANKQGVDNATVLQSLENWDGVWSADPRPLVESTVEYANFQYELGYISSQLTEEDIFDVSFYEKVSEE

SEQ ID NO: 35741 - protein, 869 aa, Methanococcoides burtonii DSM 6242
MDLNRFTQKAQEAIQKSFSIAARYYNQQTECEHLLLALVEQTGGLVPTILDRIGAENQSIIKELEDHLSELPQVSGSGSGQTYVSQAYSRVLDTAENEASSMNDEYISVEHVLIALLKEKESTSYRILEEAGITIDATLEAIKKLRGNRRITSENPEDTMEPLKKYGIDFTELAAQGKLDPVIGRDQEIRHTIEILSRRRKNNPVLIGEAGVGKTAIVEGLALRIAKHDIPEDMKNKKIIALDMGALIAGAKFRGEFEERLKAVLKEVADSEGQIILFIDELHTIVGAGATEGAMDAGNLLKPMLARGELHCIGATTLDEYRKYIEKDAALERRFLPVLVDQPDVENTISILRGLKEKYEVHHGVRIKDTALVAAAVLSNRYISDRFLPDKAIDLVDEAAAKVRTAIDSKPSELDEADRKILQLEIEREALKKEKDAVSKERVADLEKELADIRAESDAMRAKWQSEKDTIANLGSLKQQIEDIKIQLELAENSGDFELASKLKYGSLTPLEHQYKEEETKLQEQQDDMLLKEEVWEEDIAQVVSQWTNIPVTRLMEGEREKLTHLEEKLHERIVGQNETVKAVSDAIIRAYAGIKDPKRPIGSFIFLGPTGVGKTELAKALAAEMFNDENNMIRIDMSEYMEKHTVSRLIGAPPGYIGHDEGGQLTEAVRRRPYAVVLFDEIEKAHHDVFNVMLQILDDGRLTDSHGRTVDFKNTLIIMTSNICVDRTLSKLEEGEDYAKMQEMAQNELAKHFRPEFINRIDELAIFRPLTKEQLVTIVDIKATDLIQRLKEKRMVLEISKKAKHYLAEAGYSETYGARPLKRVIQNEVETAVAKLIVGGQALEGSTIEVDADDRGIVVNVRTEPAKQ

SEQ ID NO: 35742 - protein, 415 aa, Methanococcoides burtonii DSM 6242
MSDVSAGSTTEKKFSDMDSNGEEHNTDEIQEVDIQKVISENDLLKVQNETMKAKLLETSMMVNKYLSEMDQLKDQLDHLTTPPLFIASVMEVEDDMALLRQHGNNQEVMTRIPPEMEGTIGPGMRVSINAAFAIIAIISRAADVRAQMMELIDSPGIDYDMIGGLDDVLKEVIESVELPLTEPELFENIGIEPPSGVLMYGSPGTGKTLIAKAVASRAHATFIRMSGSDLVQKFIGEGARLVKDVFQLAREKSPSILFIDEIDAVGGMRTHDGTTGSAEVNRTMLQLLAEMDGFDPSGNVKIIAATNRIDLLDPALLRPGRFDRIIEIPIPDEKAREEILKIHTRKMNLEKDIDLAKIANMTDGLSGADLNVIVKEAGMFVLRRRGDMIKMQDFLEAFEKVVSEEEVNTPAGMFA

SEQ ID NO: 35743 - protein, 569 aa, Methanococcoides burtonii DSM 6242
MTLSDEDKITIEKFALQNAVKYGKAPQLGAVMGKVMGLCPHLRPLSKEVGPVIQHVLDEVMKEVPEEWQARLEVIAPELIEELNTKKEPDKGLKPLDVKEGESVVMRFAPNPNGPPTLGSTRGIVVNSEYVKRYGGKFIIRFDDTDPQTKRPMLEAYDWYLEDCEWLDAKPDEVVIASDNMEVYYDYARQLLEMGHAYVCFCEGGDFKKFKDAKEPCPHRGHAPEVNLEHWDKMLAGEYEEKAAVVRIKTDIEHKDPAMRDFGAFRIVKTAHPRPEVDDKYVVWPLLDFEGAIEDHVLGMTHIIRGKDLMDSEKRQGYIYNYLGWEYPKTTHWGRVKMHEFGKFSTSGLRQSIEDGEYSGWDDPRLPTLRALRRRGIKPEAIRKFMIDMGVGETDVSLSMDTLYAENRKIIDTIANRYFFVWDPVELEVEDAVCCTVNPSLHPSEDRGVRCIDIGSKLLVCKSDVESAELGDMLRMKYLYNIEITSVSPLKCKCIGDSMEDAKSNKMRIIHWVPEDGIPVKVLAPQGEFIGMGEKQIVDELDNVVQFERFGFCRIDSVDDGVVAYFTHK

SEQ ID NO: 35744 - protein, 523 aa, Methanococcoides burtonii DSM 6242
MKVLVSDSLSEEGVSKLSEHFDVDVSTGLSEDELVEKIGIFDALVIRSGTHVTKRVIEAADNLKIIGRAGVGVDNVDVDAATEKGIIVVNAPEGNMLSAAEHTIAMMMSMARNIPQANASLKAKKWERKNFMGVEVNGKTLGVIGLGRIGAEVAKRAQGLEMSILAYDPFVTEDRAKDMGVELTTVDDIAQRADFITVHTPLIKETRNILDKAQFDMMKSSTRVINCARGGIINEEALADAARNGKIAGAAIDVFTSEPPFDCPFIGLDNVIVTPHLGASTEEAQVNVAVSVAEEIISVLNGGSARNTINIPAVKPEVMAILAPYIGLAETLGSVAAQLLDANYNKIEISYNGEIADKDTRAVTVAALKGILEDAVGSAVNYVNAPSLAKSRNVEVVESKSETSGDHASTIRITLFQGTNTKSVSGAVVGREPKIVMIDGQYVDLVPNGFMIVSNHVNRPNVIGPCCIVLGENNINISGMQVGRVEVGGNTIMALNVDNEVSEGILDEIRAINGILDAKLVTL

SEQ ID NO: 35745 - protein, 335 aa, Methylobacillus flagellatus KT
MAHMGISKLKPSNSATTLLQLAREVLAIEAREVQALAGRLDQSFVNAVELILQCRGRVVVTGIGKSGHIGNKIAATLASTGTPAFFMHPAEASHGDLGMITRDDVVIALSNSGEADELLALLPPLKRIGTPIISISGNRHSTLSKAADIFLDAHVSQEACPLGLAPTASTTAALALGDALAVTLLDQRGFSREDFALAHPGGSIGRRLLLHVQDVMRSGDDIPAVSVSSSLKDGLLEMSRKGLGMTAVLDAADKPVGIFTDGDLRRAFEAGIDINGTRMADVMHAHPRSILPGQLAVDALALMEQYSISSLLVVDQQGNLVGALNMHDLLMAKVV

SEQ ID NO: 35746 - protein, 105 aa, Methylobacillus flagellatus KT
MDTQALIKNQVTSNPVVLYMKGSPKFPQCGFSGLAVQILQACGLKDFVAVDVLADPAIREGIKTYANWPTIPQLYIKGEFIGGADIMRDLYQQGELQKLLQEAQA

SEQ ID NO: 35747 - protein, 433 aa, Methylobacillus flagellatus KT
MSHSEYKPTLPEPTAGNDDMDHGRRRFFHQAIASTLGAAAMLDIIPSTLSRQAWAAGSDAPELTEVKIGFIPLTDCAPVVVAAQMGFDKKYGIKITPSKEASWAGIRDKVANGELHAAHMLYGMVYGVQMGIGGQQKDMSILMTLNHNGQGITLANQLKEKGVTTGQALKRLIDNENRDFTFAQTFPTGTHAMWLYYWLATYGINPFKDVKTIVVPPPQMVANMRIGNMDGYCVGEPWNARAIHDKIGFSVATSQDIWADHPEKVLGTTADFTARNPNTALAMTKAILEACRYIDATANRPAVAKLISGKAYVNAPESVIEGRFLGHYDNGIGKRWEDPNYMKFFNDGKVTFPYLSDGMWFLTQHKRWGLLKTDPDYLAITKKVNRIDIYTEAAKSLGIAVPSDPMRSSKLIDGVLWDGKDPKAYASAFKIKA

SEQ ID NO: 35748 - protein, 270 aa, Methylobacillus flagellatus KT
MAYLLPSEFVTKMVDAGESKVFMSTRDTIIRAYMAGAILALAAVFAVTASVQTGYPLIGAILFPVGFVMLYLLGFDLLTGVFVLTPLALIDKRPGVTVKGILRNWGLVFVGNFLGAFTVAVFMAIVFTYGFAAEPDKVGTIIAGIGEKRTLGYAEFGAAGMLTVFIRAVMCNWMVSTGVVGAMISTSVSGKVMAMWMPIMVFFGMGFEHSIVNMFLFPSALIMGGNFSIMDYLIWNELPVVLGNLVGGLAFTGLTLYSTHIRTAPKRSIG

SEQ ID NO: 35749 - protein, 586 aa, Methylobacillus flagellatus KT
MFSDLWPLLRPYRWQILLAFCLLSLASAILLLVPWAFRDLIDQGFGTGTAAAQNAQDINRHFVFICGLVIVWALIVACRYYIVSWIGERVTADLRSLVYERVLTQSPQFFETLQTGEVLSRLTADTTLIQTVVGSSISLGLRSLFQFIGGMIMLAVTSWYLFSLNLGLMLLLTLPIMLIGRSVKTLSRESQDRIADSSAMAGEILNAMPTVQSFTQEPREQQRFRHSVETSFKAAVRRIRVRAFLAAFVIAGISAAIIFVLWLGAHQVTQGELSGGELASFILYAALVAGSVSTIAEVWGDIMRAAGAAERLLELLNSKPAIRDPSTPVLPSSTDMASIKFDNVSFYYPAKPDQPALDHISLEINAGETVALVGPSGAGKTTLFQLLLRFYDIFEGSISINGLDIRNLSLDTLRGMIAIVPQDPVIFSANALENIRYGRPDASDEEIKHAAQAAQAHAFIERLPQGYDTFLGERGTRLSGGQRQRIAIARAMLKNAPILLLDEATSALDAESETLVQQGLASAMHGRTTLVIAHRLATIQNADRVVVLEHGRIVETGTPNELRRQSGLYSRLAKLQLDIHPDHAPQ

SEQ ID NO: 35750 - protein, 468 aa, Methylobacillus flagellatus KT
MLAQLFRTKPVEIGHHSGLKKCLSAFDLALLGIGCAIGTGIFVLTGIAAAVYSGPAVVISFVIAGFAAAFAGFAYAELASSVGGSGSAYGYSYVAFGEFIAWVIAWILLLEYGVGAAAVANGWSGYFINTLANFGIAIPEAWTKAPSQGGIINLPAFGIIWLLVFILISGVKQSSTVNNIMVAIKLSTIAIFLAIAVGHINSDNWHPFMPFGWFSSQADGSNIGILAGASLVFFAYFGFDAVSTAADEARNPQRDLPIGLIASVTFCTLIYILVSGVLTGVVHYSDLNVSSPVAYALSKLGYSWSSSLVATGVLAGLITVLLVLLYGLTRILYAMSRDGLIPAAFSKVNPDRQSPTRVILFCGSIISIVAGFFPLGTLAETVNIGTLASFVMVCVGVIVLRKRQPDLHRPFKNPGGPIIPLLGIISCSALMAFLPGETWHRFLIWVGIGIIMYFAYSMHHSKLRQRNS

SEQ ID NO: 35751 - protein, 333 aa, Methylobacillus flagellatus KT
MRIVFFSTQVYDRESFLALPRLQNAEFIFQQPKLTLDTAVLATGAEVVCAFINDDLSAPVLERLAANGTKLIALRSAGYNHIDLEAAQRLNLAVVRVPAYSPHAIAEHTVALILALNRHLTRAYNRTREGDFSLRGLTGFDLVHKTVGIIGTGQIGAAFARIMAGFGCRILAYDPYPNPEVIALGASYLELDTLLAQSHIVSLHCPLSPATHHLINAGSLSRMQPGSMLINTSRGALVDTPAVIEALKSGHLGYLGLDVYEEEADLFFEDLSDFPLQDDVLARLLTFPNVIITAHQAFLTREALNAIASTTLDNISAWAAGHPQNLVRLETGS

SEQ ID NO: 35752 - protein, 444 aa, Methylobacillus flagellatus KT
MSDTPKIPQTEPRFSATFDKHTMSEIRRAAATGIYDIRGAGAKRKLPHFDDLLFLGASVSRYPLEGYREKCGTDVVLGTRFAKKPIHLKTPVTIAGMSFGALSGPAKEALGRGASAVGTSTTTGDGGMTPEERGQSSILVYQYLPSRYGMNPDDLRKADAIEVVIGQGAKPGGGGMLLGQKISDRVAKMRCLPKGVDQRSACRHPDWTGPDDLEIKIAELREITDWEKPIYVKVGATRPYFDVALAVKAGADVVVLDGMQGGTAATQEVFIEHVGIPILAAIRPAVQALQDMGMHRKVQLIVSGGIRNGADVAKALALGADAVAIGTAALIALGDNDPRLEEEYNKLGTTAGAYDDWHEGKDPAGITTQDPELMKRLDPVKAGRRLANYLSVMTMEAQVIARACGKSHLHNLEPEDLVALSIEAAAMAKVPLAGTSWIPGVSQF

SEQ ID NO: 35753 - protein, 408 aa, Methylobacillus flagellatus KT
MALIVQKYGGTSVANPERIGNVARRVARHKALGQQVVVVVSAMSGETNRLISLAKEVMPNPDPRELDVLVSTGEQVTIALLSMALMELGVKAKSYTGGQVSIVTDSAHTKARILKIDEERIRKDLDAGYVVVVAGFQGVDEQGNITTLGRGGSDTTGVALAAALKADECQIYTDVDGVYTTDPRIVPEARRLRSVTFEEMLEMASLGSKVLQIRSVEFAGKYKVKLRVLSSFEEEGEGTLITFEDDKDMEQPVISGIAFNRDEAKITVLGVPDRPGIAYQILGPVADANIDVDIIIQNVGADGTTDFTFTVHKNDLQKALNILREKVQPHTGAREIIGDDKTAKVSVVGVGMRSHVGIASQMFRTLAEEGINIQMISTSEIKISVVIDEKYMELAVRVLHKAFGLEEV

SEQ ID NO: 35754 - protein, 126 aa, Methylobacillus flagellatus KT
MQRTMLKSKLHRVHVTHSELDYEGSCAIDEALLEAADIKEYQQIDIYNVNNGERFTTYAIRAERNSGIISVNGAAARKASPGDLLIIATYASYTEAELAQFKPQLVYVDADNRIKNQRQHIPVQAA

SEQ ID NO: 35755 - protein, 402 aa, Methylobacillus flagellatus KT
MLSATARPYIEASVPVLREHGLKITQTFYHNMLSAHPELKNLFNMGNQANGIQQQSLAAAVFAYAANIDNPAALAPVVKRIVHKHAAVGIKPEHYPIVGQYLIGAIKQVLGEAATDELLAAWGEAYWSLANLLIEEEKSLYASTASTAGALMTLKVARKVFESEHIVSFYLQHPDGRKPGDFLPGQYISVEMQFEQNKRRQLRQYSLSDSSTAPWWRISVKREQEAEKPEGLLSNWLHDEVKVGDLIHATPAFGDFVLDPVISDQPLLLISAGIGITPMLSMLNSVRDLAPQRPVFFAHAARSPAWQSHSLDLQEARYRMTNLQTALFYESLEGAHGSIGGVYQGRMDITDLWPAVLHHADIYLCGPLGFMQAQREQLLQAGVAASHIKREVFGPDLLDHLL

SEQ ID NO: 35756 - protein, 180 aa, Methylobacillus flagellatus KT
MKLVILDRDGVINYDSPQFIKSPDEWKPIEGSLEAIALLNQNGYRVALATNQSGIGRGLFDMATLNAIHDKMHKALAQFGGRIDALFYCPHAADANCSCRKPRPGMIEEISKRFGMDLKGVPSVGDSLRDLQASAAFGAQPILVLTGKGEKTLEVGGLPENTWVCDNLAEAAQRIITELA

SEQ ID NO: 35757 - protein, 311 aa, Methylobacillus flagellatus KT
MMVFTGNANRALAEEVVSHLGIALGRATVDRFSDGEVMIELLDNVRGKDVFILQSTCMPTNDHLMEVMVMVDALRRSSAARITAAIPYFGYARQDRRPRSARVAITAKVIANMLTTVGVNRLLTMDLHSDQIQGFFDIPVDNIYATPILLQDLTQQNHDDLVVVSPDVGGVVRARAAAKHLNVDLAIIDKRRPKPNVAKVMNIIGDVSGRTCVLMDDMVDTANTLCEAAIALKQQGAKKVVAYCTHPVLSGEAVSRITNSELDELVVTNTIPLRPNAQQSPKIRVVSAGELFAETIRRISNEDSVSSLFVE

SEQ ID NO: 35758 - protein, 233 aa, Methylobacillus flagellatus KT
MLRILLIDDDVELCQMMEEYLGAEDFSLTIAHDGEEGARLALSGEHDLVVLDVMMPRFNGFDTLRLIRASSQIPVIMLTAKGDEIDRIVGLELGADDYLSKPFNPRELVARLRAIQRRVVVRDEALQNHHNKPSITRVGKIAIYPSERIIEWKGEPLDITTSEYALLEVLARHAGHVVSKAELFTQALGRAESRYDRSVDVHVSNLRQKLGLLEDGRSPIQTVRGVGYQFIAG

SEQ ID NO: 35759 - protein, 410 aa, Methylobacillus flagellatus KT
MTQQLSLPKDKIRFLLLEGVHQNAVEVLNAAGYRNIDYRKTALDEDALIEAIKDVHFLGIRSRTQVTAKVLDAANKLTAIGCFCIGTNQVDLDGALERGIPVFNAPYSNTRSVAELVLAQTILLLRGIPEKNALVHRGGWTKSAEGSFEARGKTLGIVGYGSIGSQLSVLAESLGMKVIYFDVIAKLPLGNARQVGTMEELLSQADVVSLHVPELPSTKNMMRAEQFAQMKKGSIFINAARGTCVDIDALARAIESKHLAGAAIDVFPVEPKSNDEEFQSPLRAFDNVILTPHIGGSTQEAQANIGIEVGEKFVRYSDAGSTITAVNFPEVSIPKQPGTHRLLHIHRNVPGVLSAVNSLFARNNINIAAQSMMTKGDIGYMIMDVEASASSAAIEALQTVEGTLRTRVLY

SEQ ID NO: 35760 - protein, 395 aa, Methylobacillus flagellatus KT
MSKLVLVLNCGSSSIKFGLFDIGQAEIPRRPRWNGKVDGILGPHPSYGDSLTRPYQVELGCEHPYSEALRYIIDRTQAQLHGDRLVAIAHRVVHGGSKYFKPVRVDDEVLRDLRSYIPLAPLHQPFALEAIERLLEIDPGLPQVACFDTAFHHTLPEVEQVLPLPYAAYERGIRRYGFHGLSYEYMAMHLPELAGDRARGRTIVAHLGSGASLCGMQDLRSMATTMSFSALDGLMMGTRCGALDPGVLLHMMEVEHLTPARVGEMLYHESGLLGVSGIASDPRVLLQCEAAEPRARLALALYVRRIVREIGAMAAALGGLDMLVFTAGIGEHNAEIRKRVVDGLDFLGLELDEAANQAHAQVISAPGSRPLALVALTNEEWMAARHAQALLRFDL

SEQ ID NO: 35761 - protein, 640 aa, Methylobacillus flagellatus KT
MGKIIGIDLGTTNSCVAVMEGGKPRVIENAEGARTTPSVIAYQEDGEILVGAPAKRQAVTNPKNTLFAVKRLIGRRFDEKEVQKDIGLMPYTITKADNGDAWVEVRGQKLAPPQISAEVLRKMKKTAEDYLGEEVTEAVITVPAYFNDSQRQATKDAGRIAGLEVKRIINEPTAAALAFGLDKQEGDRKIAVYDLGGGTFDISIIEISEIDGEHQFEVLSTNGDTFLGGEDFDNRLIDFLADEFKKENGIDLRNDLLAKQRLKEAAEKAKIELSSSTQTEVNLPYITADASGPKHLVVKITRAKFESLVEDLIERSIKPCEVALKDAGVKVSDIQDVILVGGQTRMPKVQEKVKEFFGKEPRKDVNPDEAVAVGAAIQGGVLQGDVKDVLLLDVTPLSLGIETLGGVMTKLIQKNTTIPTKASQVFSTAEDNQSAVTIHVLQGEREMASGNKSLGQFNLTDIPPAPRGMPQIEVTFDIDANGILHVSAKDKATGKENKITIKANSGLSDEEIKRMEEEAAKYADEDKKLRELVDARNSADSAIHSVKKSLAEHGDKLDAAEKGAIEKAVQELEDVIKGDDKAAIESKTNALIEASQKLGEKVYAAGETESSAAEPGEPQEKTVDAEVVDAEFEEVKDDKK

SEQ ID NO: 35762 - protein, 405 aa, Methylobacillus flagellatus KT
MTVRTPIYLDYSATTPIDPRVAEKMIPYLTEHFGNPASRSHAFGWTAEKAVENAREEVARLVNADPREIVWTSGATESNNLAIKGAANFYSPSKGKHIVTVQTEHKAVIDTVRELERLGYEATYLIPEPNGLIDLDKFKAALRPDTVLASVMLVNNEIGVIQDIEAIGNICREQGVIFHVDAAQATGKVHIDLQKLPVDLMSFSAHKTYGPKGIGALYVRRKPRVRIEAQMHGGGHERGMRSGTLATHQIVGMGEAFRIAREEMDSENVRIRQLRDRLLKGLQEIEEVYVNGDLEHRVAHNLNISFNFVEGESLIMAVKDIAVSSGSACTSASLEPSYVLRALGRSDELAHSSIRFSIGRFTTEEEIDYTIQLMKSKIGKLRELSPLWEMHLEGVDLNAVAWATH

SEQ ID NO: 35763 - protein, 382 aa, Methylobacillus flagellatus KT
MPRAAYFDNNGTTALHPKVLQAMLPYLSEQQGNATSRHMYGRSARNAIDQAREQVADAVGAHPSQVIFTSSGTEADNLAITGVANALGNGRIAVSCLEHPAVSRPAEALRWHGWILDRIASNRHGQVEKNALEAILQNKTDMVSVMLANNETGVIQDVAGLGELARKHKAYMHTDAVQALGKMDVDFASLNVHAMSLSSHKINGPQGAGALILDKRIDIQPLLYGGGQERGLRSGSENIAAIVGFGAACSLAVAEARQGRTELARLREHLEQGLRRLDAVIFGAEAERLPNTSFFAFAGIEGETLVMALDKQGFAVTSGSACSSDNTEPSHVLLAMGIQPDTARGAIRVSLGANNDIDEINAFLQALESELTRLRKLTAVAV

SEQ ID NO: 35764 - protein, 296 aa, Methylobacillus flagellatus KT
MTSSNAFRCGTVAIVGRPNVGKSTLLNHILGLKLSITSRKAQTTRHRLLGIHTTEDTQFLFVDTPGFQQKHINALNRNLNRTVTQVLSEVDVVLFVIEPMHLGDADRKVLQLLPKNQPVFLVVNKADLMGDKGNLLPLIQDFDLEFPFTGIIPVSAKKNLYLDELLAAVREHLPEQPAIYGEDELTDRNERFLAAEMLREKIFRLLGDEVPYSVAVEIEKFEQEGNLRRIHAAIIVDKDSQKPMLIGKGGEKLKRISTEARQDMEKLFGGKIWLETWVKVKSGWADDERALKSLGY

SEQ ID NO: 35765 - protein, 429 aa, Methylobacillus flagellatus KT
MQEISKSSKLSNVCYDIRGPVLDRARQMEEDGHRIIKLNIGNPAPFGFAAPEEILQDVIRNMDSASGYTDSKGLFAARKAIMHYTQQKNIQGVTIDDIIIGNGVSELIVMAMQALLNNGDQVLVPMPDYPLWTAAVNLAGGTARHYVCDEQTGWLPDLRDIENKITANTRGIVIINPNNPTGALYPRETLEGIIEIARHHGLVIFADEIYDKVLFDGNTHTSIASLADDVLFVTFNGLSKNYRTCGYRAGWLVISGEKRHAGDYIEGLNMLASMRLCANVPGQLAIQTALGGYQSIDDLVAPTGRLCKQRDLAYKMLTDIPGVSCVKPKAGLYLFPRLDPKIYPIQDDQQFILDLLLEEKVLLVQGTGFNWRAPDHFRVVFLPNVDDLTEAFTRIARFLENYRKQHSTITIVEGKASKEAQTTSQSASA

SEQ ID NO: 35766 - protein, 722 aa, Methylobacillus flagellatus KT
MSRPTLLIVDDNERLAQSLQQLLQLHGYNAEICSSGEDALQLVMDIKFDLVLLDLSMPDMNGFDVLTELATYSAPPPVIVISGTKTLNAAIEAMRLGAYDFLRKPYQPEELLHTIENAIEKSRLETQNRSIHARLEESENLYRYLVNSSPDIIYTLDDSGHFTFINHRVETLLGYRRESLIGKHYTEIIYSDDFDRASYAFNERRTGNRATRNIELRLKCKDLESDIRHFEINFITVVLNATGTYGGTHESGTPFSGTYGVARDISDRKKVEEVITRQAYHDTLTGLPNRALFKDRLNVALNHAKRNQQQLAIMFLDLDRFKWVNDTLGHFYGDELLKHVAQRLSGCLRAQDTLARMGGDEFTLLLHDLQQPEDASLVAAKIVDELKRPFLLDEREIFISSSIGIALYPDHGDTIETLIKSADIAMYHVKWRGKNGYQYYEASMNAMFHKKLSMENELRRAIEKKQIMLHYQPQVDVETRKIIGLEALARWHHPELGIISPTEFIPLAEETGLIFSLSEMLLGEACKQMQLWEAAGLLNFRLALNVSPQLVEEESFVSKTLSYIQSHHLKPEFFEIEITENLLVRDLENTVAKLKALGKHGIRIALDDFGTCYSSLSYLRQFPIHNIKIDKSFVGDINTHDESVPIITAISGIAKGFKLDLIAEGVETLQQMKTLHKMGCNIMQGYLFSKPLPAQNITTLLKRQANLFHKNGEPDDALITQH

SEQ ID NO: 35767 - protein, 68 aa, Methylobacillus flagellatus KT
MATGIVKWFNDSKGFGFITPDEGGSDLFAHFSAIVNEGGYKSLAENQRVSFDVTDGPKGKQASNIKPE

SEQ ID NO: 35768 - protein, 460 aa, Methylobacillus flagellatus KT
MNAQPEDNVNTDTISFASLNLAPELLKALDESGYTTPTPIQAQAIPVVLEGSDLMAGAQTGTGKTAAFTLPLLQKLLPLASSSASPARHPVRALILTPTRELAIQVEESVKTYAKHTPLRSLVVFGGVDIKSQTPTLMKGVEILVATPGRLLDHVEQRTVQLGQVQMLVLDEADRMLDMGFMPDLKRILALLPKQRQNLMFSATFSPEIKKLSEEFLTKPVLIEVARSNATSENVTQKILLVESEHKQHVLADLLRKEATQVIVFTKTKLSASRLARHLEREGIAAGAIHGDKSQLERIQALDAFKQGKITALVATDVAARGLDIDQLPMVVNYELPSAAEDYVHRIGRTGRAGASGIAISLVSSEEEKFLKEIEKLIKRELPKEQANAPQPVRRGQDTQRQKAPASIAPRQRHAGRNKEDEWFFKPYEPSTDAPAPKPMHSREKSKKEIPALLGGLNRK

SEQ ID NO: 35769 - protein, 456 aa, Methylobacillus flagellatus KT
MSFENLNLHPAILRALTEAGYSTPTPIQAQAIPEVLEGHDLMASAQTGTGKTAAFTLPALNLLATPHPAKSRGPRILVLTPTRELAAQVNEAARKYGKFLRARTVSIVGGMPYPLQNKLLSQPIDILVATPGRLLDHMERGRIDMSRLQMLILDEADRMLDMGFMPDIERISSALPSERQTLMFSATFEGQIANIAKTLLKTPKVIQIAAQKEKHANIEQKLLFVDDMAHKNKLLEHLLIAPGVNQAIVFTSTKRHADLLAEDLYAAGHKSAALHGDMTQGARNRTLTKLRHGDVRVLVATDVAARGIDVQGITHVINYDLPKFAEDYVHRIGRTGRAGNTGVALSFASHMDRHQLRKIEQYTGQRLEISVIEGLEPKRPAPRMDHNDKPRSGRPGQRPGGGGYKPRGQGYASRDGNRSEGRSFGDRAAGSRTDANRGPAKRQDSDRPARRSRSFA

SEQ ID NO: 35770 - protein, 398 aa, Methylobacillus flagellatus KT
MELSQRVQSIKESPTLAVTARAAKLKAEGRDIIGLGAGEPDFDTPQHIKDAAKQAIDQGFTKYTPVAGIPGLKKAIVAKFKKENGFDYTEKEVIVGVGGKQCIFNLALAVLNPGDEVIVPAPYWVSYADIALVAGAKPVIIECGIEQGFKLTAAQLEAAITPQTKLFMINSPSNPTGAVYSLEELKALGAVLKKHPHILVATDDMYEHVNLTGDKFYNILNAAPELKERCIVLNGVSKAYSMTGWRIGYAAGPAKIIKAMEILQSQSTSNPTSISQVAAQAALEGPQECITPMLDAFRERHEFVVKRFNEIKGLKCIKAGGAFYAFPDAREAIHNLFAAGKIKQATDMALSEYLLEQEGVAVVPGSAFGAEGYFRISFATSMDNLKKALERIERALAN

SEQ ID NO: 35771 - protein, 67 aa, Methylobacillus flagellatus KT
MALGTVKWFNDAKGFGFISPDEGGDDLFAHFSEIQTSGYKSLKENDRVQFEITQTAKGKQASNIQKA

SEQ ID NO: 35772 - protein, 558 aa, Methylobacillus flagellatus KT
MYIYDEIDQAIVDERVKQYRDQTRRFLAGELSDEEFRPLRLQNGLYIQRHAPMLRIAVPYGMLSSRQLRKLGDIAKRYDRGYGHFSTRQNLQLNWPQLEDVPDILAELATVQMHAIQTSGNCIRNITTDQFAGVAPDEVVDPRAIAEIARQWSTFHPEFALLPRKFKIAVSGTKQDRALIQTHDIGLEFYRDQEDKIAVRVWVGGGLGRTPILGSVIREHLEWQHVLTYCEAIIRVYNLHGRRDNAYKARIKILVKALGIEEFRRQVEEEWQYLKDSPNTITEAELARVSKYFTQMPYETLSDHDAGFDSAIASNPAFAAWVKRNTHPHKQPGYRAVTLSLKSHGRPPGDITSEQMHIVADLADEYSFGEVRPSHEQNLILADVKLSDLYSLWEKARAAGLATPNIGLLTDIICCPGGDFCALANAKSIPIAEAIQMQFDDLDYLYDIGEIELNISGCMNACGHHHVGHIGILGVDKDGSEWYQVTLGGKQGNDASIGTVLGPSFAAEEMPGVIQKLIDVYVRERTPEERFIDTVRRIGVAPFKTHVYGEKKKEVAHA

SEQ ID NO: 35773 - protein, 406 aa, Methylobacillus flagellatus KT
MSDVNKVVLAYSGGLDTSVILKWLQDTYQCEVVTFTADIGQGEELEPAREKARQFGVKEIYIDDLREEFVRDFVFPMFRANTVYEGEYLLGTSIARPLIAKRLIEIAQETNADAVSHGATGKGNDQVRFELGAYALNPNIKIIAPWREWDLLSREKLLAYAEKHGIPVEMKHRQGGSPYSMDANLLHISYEGRHLENPAAEAEEDMWRWTVSPERAPDEAEYLEIEYRNGDPISLNGKTLKPHELLAELNRLGGKHGIGRLDLVENRYVGMKSRGCYETPGGTILLKAHRAIESITLDREVAHLKDDLMPRYASMIYNGYWWSPERLALQALIDHTQQTVNGWVKLKLYKGNVIVTGRDSGTDSLFDPNIATFEDDAGAYDHRDAGGFIKLNALRLRIAANLRNKK

SEQ ID NO: 35774 - protein, 437 aa, Methylobacillus flagellatus KT
MPISLLPLTLLFSLCIVPLPVSAGEGAPQALAVDSVWVAISGALVFMMQAGFAMLESGMTRAKNAVNVMMKNYMDLAVGALLFWLVGYGLMFGSNPSGWIGTDHFALAHGDDWGASMLFFQVMFAATAATIVSGAMAERTNFIAYLLGACGIMALIYPVFGSWAWNEHGWLKQMGFIDFAGSTVVHSVGAWCALAGIMVLGPRLGRFGSKGEVHMIPGHNLSLVAMGGFLLWFGWFGFNGGSTLAAGVEIGPILLNTHMAGAAGAVGALLVALAMRRPILMAYVVNGSLGGLVAITAGCASMDVPFAVLTGFIGGIVTMLGVWALEKLRLDDVVGAVAVHGFSGVWGTVAAGLFLKDNMFDLNQVLVQMIGVAVAFVWVFLSALLMYGLLARTIGLRVSTMHEQRGLDITEHGEVGYPEFNREAAYQPEHVQHLSRL

SEQ ID NO: 35775 - protein, 559 aa, Methylobacillus flagellatus KT
MSADFFTRTDIMIAILEAKHAGLLSRQYWSRNIMSGLIVGVVALPLAMAFAIASGAKPEQGLYTAIVAGTLASLFGGSRLQITGPTGAFIVILSGITAKYGIAGLQIATLMAGAMLLLMGLARMGSVIRYIPEPVIIGFTSGIAVIIFVGQWQDFFGLAPQASHHFHEKLLHLVEALPQLQWQTSLLGAFTLAVLVLSNRYLKKIPGPLVAIVAATVVQSVFQFQQVATIGSAFGGIPQALPHFSLPEGIGPAVMIELIGPAFTIALLGAIESLLSAVVADNMAGTRHQPNQELIGQGIANIASPLFGGFAATGALARTATNIRNGANSPLSGIVHAVTLVLIVVLLAPLAVNAPLAALAAILFVVAYNMSEVHRFLHIARTAPRADVAVLLITFLLTVFSDLVIAVNIGVVLAALLFMKRMADTVNVTQLSDDDLQQEYGPHAWHLPPGTLVYRLEGPFFFGAAEHLQRRLQTIGENTDTIVLRMARVPIMDATGLQALWNLLDTCKQHNIRLVIVEARPNILEKLRRSGIIGQIGPHHVLPHLHLLWQEAPSSPLPG

SEQ ID NO: 35776 - protein, 596 aa, Methylobacillus flagellatus KT
MVTMSEKPPVAPASNFIRNIIERDLEQGTYASRRWAGSPGDAVHQATGGPDPAKIRTRFPPEPNGYLHIGHAKSICLNFGLARDFGGVCHMRFDDTNPEKEEQEYVDSITESVKWLGFDWEAFGTSHLYFASNYFDFMYRAAEYLIESGNAYVDQQSAEEMRINRGTLTEPGKNSPWRDRPMQESLTLFREMRDGKHADGSMVLRAKIDMASPNINLRDPAIYRIKRAHHHNTGDKWCIYPMYTYAHPLEDAYEGVTHSICTLEFEDQRPFYDWVLEKLAEGGLLAHPLPKQYEFARLNLTYVVLSKRKLIELVEKQLVNGWDDPRMPTLVGARRRGYAPEGFRLFAERIGVSKADSWIEYTILEDCMREVLNASAERRIAVLDPVKLVIDNYPEGQSEDCHAPNHPQKPELGHRVVPLSRELWIEREDFMEEPVKGYFRLFPGNMVRLRYGYVVKCTSYEKDAAGHVTVVHCEYLPDTKSGTPGADSVKVKGNIHWVSAAHAYAAEVRLYDRLFKEAHPGQGKHEDGSDRDYLDDINPNSVKTITAQLEPALKDAKPEERFQFERHGYFVADSKDSQPGKPVFNRTVTLRDAWQK

SEQ ID NO: 35777 - protein, 583 aa, Methylobacillus flagellatus KT
MSKTALGKANASVQSARALYLRLLKYAARYWVAFLISIIALVTFSATNTGFLATIKLVTDAGFVNQDSTKLHLLPFMLFGLLAIRALAGFISNFAMRWVARRVVENLRQDTFRRLMSLPVSFFDAVSAGVVTSKLTYDTEQMAGAATKVAMSAVRDTLTILGMVGYMLYLDWQLTLIFAVVAPAMAWYLKSMTPKLRSSGKAVQQTMGEMTKVIEEAVSGQRMVKIFGGGDYEYQRFTKVAGKNRHMQIRLARFSGLNSMVVELLAGVALALVVFYAVGKFSAGEFAAFIGALLMLIGPVKTLTSLNEELQVGLAAAHSVFELIDSIPEVDEGHEEIGRAEGSIVFENVTLQYPSAQRPALLDLNFTVKPGEKIALVGRSGGGKTTLVNLLPRFYEVQQGRVLIDGVDVRNMSLKSLRQQFSLVSQDVILFNDTVFNNIAYGVLRNASEEDVIAAAKAAHAWDFIQQLPNGLQSEIGDRGVRLSGGQRQRLAIARAILKNAPILLLDEATSALDTESERHVQAALDELMQNRTSIVIAHRLSTIENADRIMVMEQGRIIEGGSHEELLALDGHYAKLYRKQFH

SEQ ID NO: 35778 - protein, 67 aa, Methylobacillus flagellatus KT
MATGTVKWFNDSKGFGFITPDDGGDDLFAHFSAIVEAGYKSLKEGQRVSFDVTEGPKGKQASNIQKA

SEQ ID NO: 35779 - protein, 861 aa, Methylobacillus flagellatus KT
MRFDKLTTKFQQALADAQSIAVGNDNPNIEASHLLLALLNQEDGGTASLLARAGANLAPLRAGLQAAIDNLPKVQNNSGEVSISRELNNLLNITDRNAQKRNDAYIASEMFLLALADDKGETGRLLKTHGLTKAALEQAINAVRGNETVNSQEAESNREALKKFTIDLTERARLGKLDPVIGRDDEIRRTIQVLQRRTKNNPVLIGEPGVGKTAIVEGLAQRIVNGEVPETLKNKRVLVLDMAGLLAGAKYRGEFEERLQAVLKELAQDEGKTIVFIDEIHTMVGAGKAEGAMDAGNMLKPALARGELHCVGATTLDEYRKYIEKDAALERRFQKVLVDEPSVEATIAILRGLQEKYEVHHGVEITDPAIVAAAELSHRYITDRFLPDKAIDLIDEAAARIKMEIDSKPEALDKLERRLIQLKIEREAVHREKDEASQKRLSLIEDEIRRLEKEYADLEEIWKAEKAQVQGSKHLKEEIEKVKLQIEEATRKGEWQKVSELQYGKLPQLETQLKQAASAEEQGGQKPHRLLRTQVGAEEIAEVVSRATGIPVSKMLQGERDKLLHMEEKLHERVVGQDEAVRLVSDAIRRSRSGLADPNRPYGSFLFLGPTGVGKTELTKALAGFLFDSEDHLIRIDMSEFMEKHSVARLIGAPPGYVGYEEGGYLTEAVRRKPYSVILLDEIEKAHPDVFNVLLQVLDDGRLTDGQGRTVDFKNTVIIMTSNLGSQMIQNMSGDEYQVVKLAVMAEVKANFRPEFVNRIDEVVVFHALGESHVKSIARIQLQNLAKRLAAMEMHLDVSDAALAEIANAGFDPVYGARPLKRAIQSEIENPLAKEILNGNFAAKDTIHVDFKGGRMVFSKA

SEQ ID NO: 35780 - protein, 353 aa, Methylobacillus flagellatus KT
MKFIDEATIKVYAGDGGNGVATFRREKYEAMGGPNGGDGGRGGSIYMIADRNINTLVDYRYTRVFRAQRGENGRGSDQYGASGEDMVLRVPVGTVVSDKATGQVLTDLAEHGQKVMVAKGGKGGLGNIHFKSSVNRAPRQCTKGDPGEEFELYLELKVLADVGLLGMPNAGKSTFIRSVSAAKPKVADYPFTTLHPNLGVVRVDANRSFVIADVPGLIEGAAEGAGLGHQFLRHLSRTRLLLHLVDLAPFDESVDPVREALAITEELRKYDEALYNKPRWLVLNKVDMLEDSEQKVAEFVQRLGWQGRYFAISALAGIGCRELTYAIMEHVEEASRVEHEAAENTGAASMSGD

SEQ ID NO: 35781 - protein, 104 aa, Methylobacillus flagellatus KT
MYAVIKTGGKQYRVAAGDKLKVEKLAGEVGSEITLDKVLLVSDGDNTTIGSPLVQGASVQAKVVAHGRGDKVLIFKMRRRKHYRKTQGHRQSFTEIQIEKIAAK

SEQ ID NO: 35782 - protein, 263 aa, Methylobacillus flagellatus KT
MCNTVPFSSSPIIPWIGGKRRLAKHILPLFPEHSCYVEPFCGAAALYFLKAPAKVEVLNDINGELVNLYRVVRHHLEEFIRQFKWALTSRQIFKWMQITPEETLTDIQRAARFFYLQKLAFGGKVSGQTFGTATTSPPKLAFSRLEEDLSAAHLRLDRTYIEHLPWEDCIRKYDRDHTLIYCDPPYWGTEGYGVVFGLEQYARMAELARVIKGKMIISVNDIPEMRQAFAGLAMKHVDINYTVGGGGKDKGKARELIITSWNP

SEQ ID NO: 35783 - protein, 1836 aa, Methylobacillus flagellatus KT
MSALKDPQSENTFGLYDSSLDKDNCGVGFITRKDGVQTHDVLVKGHEALCTIPHRGGMSAEGVGDGAGVSIDLSLPFFRRLTGQALEAGRFGVGNFFLPSDASAYPRAEQIIRRALSEKGFDILLVRDVPVDNSAIRPAAVRYQLPIQQWVFAAPDDIDVQEFDRRIYKALLVIEEQAYTDAGLSGLYPLSMSAHTQVLKGRLNSNEVIPYFHDLVEEDHAVHTMYFHTRFSTNTDPHPSMAQPFRMMAHNGELNTDRKNRIAEAALARARNGKIFRPKGQSDSSRLDQTLNSRLMDDGLDLVTAVVSMMPPAWENDPTLPDNVKAMLEYFSLYEEKNDGPAALIFGNGTVIGARLDRLGLRPLRSVETQEYLCVMSEAGQINFPPESVLRRGRIEAGGMLYYDHSEKRSRGTLETLEMLAAKRDYPALLKQARATLKQLPEVPAEVAGSPQRYHGDLSLYQRFVSYYYNQESFKFMMDPMLATGAEKISAMGYGNAINALTDHEGGVAHYFSQRFAQVTNPPLDSIREADGMTLRVALGAKPNMNKGKGRQIVIDSPILSHLDMLKLREQTETPYRCFEALYTPIVGNAAANEKALEQAIDALADAIVEFAREEGGIAVISDRHVSSTQAAMPLLLVVSATNQRLIDEGLRLDVSIVAESGQIVSSHHVAAALGFGASAIYPLGVQLRAEEKYGAEADKAFKKYAKAAEKSLMKTMGKVGLCTVESYIGGEFFEPNFLNTNDPVLRKYFPNLKTPVGGADFAAIAKMVVDWHQEAQKVTDENSVPLLGLFKERSEGAGHSFGTIAVRGFVEMTEEKIHFDKQGKRAEDDFLRLMTLSKLEDAFSFKKGEAFSGSFDRLSAEEIDNFDITSSYRSFSHMMAEERAKRPSALRDVLDFPADLTGLKTADEFRAVLARYALVGNNSIAVRGLEVQELGNARFNLRLTGPLAEDISRLSSLGQALVAHFGKDISGHWLESGVLTVEAAGKAADYFSLLCPAPASVPLAEVQPASEITRSFASGAMSHGALVAPAHEAVAHGTNMVGGMSNSGEGGEHISRYGTIRASRIKQLASGRFGVWAGYLADPMLEELEIKIGQGAKPGEGGQLPAPKVTVEIAAARGGTPGVELVSPPPHHDTYSIEDLAQLIHDCKAARVRVIVKLVSSEGIGTIAVGVAKAGADVINVAGNTGGTGAAAVTSLKYTGRAAEIGIAEVHHALCANGLRDKVILRCSGAHQTASDVVKSAMLGGDSFEFGTTALMMLKCVMAKNCNVKCPAGLTTNAEAFDGDPRALAQYLLNVAHETREILASIGLRSLREARGRSDLLQLLDHPARVGQLDLRAMLAVVPEVKIENPVYMEKDFTLDDAFIDVLRQALVTDKQSEVQLGEGRRLNNCNKTVGGQLAIDIERLLNHELTEEEALRLPAVVMDKRGRRFLKPESVRVSTSGSAGQSYGAFCNDGMVMHHSGTCNDGVGKGQCGGTIIVTSPGGGSEQAGGNVLVGNFALFGATGGRLFVEGQAGDRFAVRNSGATAVVEGVGDFACEYMTNGAVLNLGAFGKGFGNGMSGGFAYQYDPYGELSRKVAADSVLLGSIADDTEMAQVHSQAIQLLLQWHLEATGSKRAAWLLENWDAERQNFVFVMPRALLLYQDSDEILKAKPRKELLEELSSALAAFQVRKFKLAYRDGKPVAGGKVPSHGDVDSEEMFELLNNYTVLNMAQQVAMAKVSNAQSVTDPAVQKAVRNLLLTEDFLLMQKLQRYAREAIDGYSDQELAVLIADKRLRDYKAALSQRNILSMDSPGTYGWIIHQSLKNSTLLGTLPSLEALFAKASMQELVTTLKSN

SEQ ID NO: 35784 - protein, 552 aa, Methylobacillus flagellatus KT
MDTKRLILFVIFSFSILMLWDSWQRDQQPPAASQTQTTAQSVEDGSVPQAAKSSASAANQASVPAETGFRLQSAERINVETDLYKASIDTIGGDLRRLELREHKDDEDQTKNFVLMDDQSAPMLYVAQTGLIGNGLPTHKEVFTSESTNYQLAPGEDKLDVRLTWKGDNGVEVHKIYTFRRDSYAIEVSYEIRNNSDTAVDPSVYYQIVHDNQSHQGSYMMPTFTGGAYYTEADKYKKLSFSDMAKTNLSKNASDGWVGLVQHYFVSAWIPEDGLVREFYTKKLSDNVYSIGSVSPLGNIAPGQSVTLKSRLYAGPQTQSELKSVAPGLEYTVDYGWLTVIATPLFWILSSIQKVVHNWGVAIILLTILIKLVFYPLSAASYRSMANMRELAPRLQRLKEQYGDDRQKLHQAMMEMYKTEKINPMGGCLPILVQIPVFIALYWVLLGSVEMRHAPFMLWIQDLSAVDPYYVLPILMGITMIIQTKLNPKPADPIQAKVMTIMPIVFSVFFFFFPAGLVLYWLVNNILSIAQQWYINRSTERAAAKKKGNARR

SEQ ID NO: 35785 - protein, 77 aa, Burkholderia xenovorans LB400
MQHTTFTGLKMATGTVKWFNDAKGFGFITPDDGGEDLFAHFSEVQGSGFKSLQENQKVTFEVKQGPKGKQAANIQPA

SEQ ID NO: 35786 - protein, 67 aa, Burkholderia xenovorans LB400
MDTGTVKWFNDSKGFGFITPDKGGDDLFAHFSEISGDGFKTLAENQKVSFETKQGPKGLQAANIKPM

SEQ ID NO: 35787 - protein, 396 aa, Burkholderia xenovorans LB400
MKIVIAGAGIGGLTAGAALLRKGFDVTILEQAKVLKEIGAGVQLSPNATRVLYQIGVGERLEGLACEPPGKRVRLWNSGQTWPLFDLGAASREIYGYPYLTVHRADLHEALVDAVRALSADAIRLDEKVEGVVQKGGKVEVQTVSGGIYEADLLIGADGVHSRVRRALFGPDEPVYSGVMAWRGVIDAEKLPEHLRTPYGTNWVGPGAHVIHYPLRGHKLVNFVGAVERDGWQVESWSESGTIEECLADFTGWHEDVRAMISAIDVPYKWALMIREPMTRWSSGRATLLGDACHPTLPFLAQGAGMALEDGYLIARCLAQYGENDLQRALERYESLRLDRTSRIVRGAAANTTRFHNPALAHAEGAADYVDREWSEERVKERYNWLFEYNVDTVEV

SEQ ID NO: 35788 - protein, 573 aa, Burkholderia xenovorans LB400
MASNTIAAYLARTLAAAGVQRIWGVTGDSLNGLAYSLDQVGSIRWMHTRHEEAAAFAAGADAASSGRLAVCAGSCGPGNLHLINGLFDCHRNHQPVLAIAAHIPSSEIGLGYFQETHPQELFKECSHYVELVSSAAQFPRVLARAMRTAVEERGVAVIVLPGDVALSEGPSEAPSWTESAPPRIVPAEADLDRLAALLNASDAVTIMCGSGTQGAHDEVVALADTLGAPVVHALRGKQFIEYDNPYDVGMTGLIGFSSGYHAMMSCDTLLLLGCDFPYRPFYPPDAKIIQIDWKGSQLGHRAPLALGLVGTVKETVAATLPKLQRKTDRGFIDNARKHYASARKGLDDLATPAGAGRPIHPQYLAKMIDESASDDAIFTADVGTPTVWAARYLTMNGKRQLHGSFNHGSMANAMPQALGAQGAHPGRQVVSLSGDGGLSMLLGDLLTARQLDLPIKVVVFNNSLLGFVSMELKAGGYLDTNVDLAKTDFAAIAKGAGIFGLRVEESEDVAGALRQVFDHPGPALLDVVTSKHELAMPPTIELAQAKGFSLYMMRAILNGRGDEIVELARTNLR

SEQ ID NO: 35789 - protein, 320 aa, Burkholderia xenovorans LB400
MSQHNADRIDVRLTQIRLEADDVASYEFRPIGTPVLPAFEAGAHIDLYLPENRVRSYSLVNAPHERHRYVIAVQREAAGRGGSAWMHRTPRVGDRFTIGAPMNDFPLCEAARQSVFICGGIGITPIVSMIRRLERTGASWQLHYAARERSRAAYADDLAQIDEAGSRITMHLESEGGRLDLRRVVERAPADAHLYCCGPRGMVDAFIEACASRPRAQVHFERFAAANESATAGGFDVVLGRDGRRIPVAPGKTILDTLLDHGVDVQYACSAGVCGTCRTGVIDGVPDHRDDYLTDEEKAGNRAVMVCCSGSLSPTLVLDL

SEQ ID NO: 35790 - protein, 393 aa, Burkholderia xenovorans LB400
MLSAEHRAIVKATVPLLESGGEALTTHFYRILIGEHPEVRPMFNLANQASGAQPRALANSVLMYARHIDQLEQLGGLVSQIINKHVALNILPEHYPIVGQCLLRAIREVLGAEIATDAVIAAWAAAYRQLADLLIGLEEKIYAEREAAPGGWRGTRLFRVARKVRESDEITSFYLRPDDNGELLAFHPGQYIGVRLYIDGEEVRRNYSLSAMSNGCEYRISVKREANGKVSSHLHTHLNENDTIELFAPAGDFTLEPGDKPLVLISGGVGITPTLAMLQAALHTNRVVHFIHSARHGGVHAFRDTIEQLAARHPQLKRFYCYEQRRADDADADGIGYLDETRLDAWLPETRDVDVYFLGPIAFMKAVKKHLKAIGVPESQSRYEFFGPAAALE

SEQ ID NO: 35791 - protein, 400 aa, Burkholderia xenovorans LB400
MTEAFLCDAIRTPIGRYAGALSSVRADDLGAVPLKALMERNKEVDWNAIDDVIYGCANQAGEDNRNVARMSLLLAGLPQGVPGTTVNRLCGSGMDAVGIAARAIKSGEAALMVAGGVESMSRAPFVTGKATSAFSRQAEIYDTTIGWRFVNPLMKKLYGVDSMPETGENVATDYNISRADQDAFALRSQQKAARAQRDGTLAQEIVGVTIAQKKGDPVTVSQDEHPRETSLDALAKLKGVVRPDGTVTAGNASGVNDGAAALLLANEETARRFGLTPRARVLGIATAGVAPRVMGIGPAPATQKLLARLNMSLDQFDVIELNEAFASQGIAVLRALGVADDDTRVNPNGGAIALGHPLGMSGARLVTTAMYQLHRTQGRFALCTMCIGVGQGIAIAIERV

SEQ ID NO: 35792 - protein, 579 aa, Burkholderia xenovorans LB400
MSAARAPLANLSANAAQMLVADLRNIVGGKHTLTGDGATRRYCTGFRFGAGKALAVVRPGTVVEQWKVLQACIAANVIVITQASNTGLTGGSTPDGNDYDRDIVIVSTSRMKKVYVIDDGKQVVCLPGATLDQLEKVLKPLGREPHSVIGSSCIGASVFGGVCNNSGGALVQRGPAYTEMAVFAQVDAAGRLNLVNHLGISLGKTPDEILGRLERGEFSAADVRHDAGAGSDHGYTTHVREIDADTPARFNADPQRLHEASGSAGKLMVFGVRLDTFPIEQNAKVFYIGTNRPDELTAIRRHALHDFKHLPISGEYLHRDAFDIAEEYGKDTFLAINYLGTSRLPALFGLKSRFDALFDRLGVFPSHFTDRVMQAASRLFPSHLPPRMKQYRDKYEHHLMLKVAAGSVEETRAFLSSYFESATGGYFECTDEEGRKAFLHRFAAAGAAVRYRAVHPREVENIVALDVALRRNDRDWIETLPPEIEETISIKLYYGHFLCHVFHQDYIVKKGNDCLEVEHKMWTLLDRRGAEYPAEHNVGHLYHAKPQLAAFYQQLDPCNCFNPGIGQMSKFANYREAAG

SEQ ID NO: 35793 - protein, 327 aa, Burkholderia xenovorans LB400
MGDAPTSQNSGKPVALVLVFITEAHRELVAQSFDLIYAPNAALGADRSNGAAQIAAHGPAIEVVLTNGTNGITPDELDAMPNLKIVCTLGVGYENVPLDYARQRGVAVCNAANTNDDCVADHAMAILLAAVRGVPKLNQQCREGIWRDDIPRPPHVSGRRMGILGLGAIGRKIARRGLGFDLEIGYFNRAPRHDVPYRYFTDVVALAAWCDYLMVTVPGGTQTQHMVNAEVLDALGPQGVLVNVARGGVVDTVALAQSLREGRVYNAALDVYEGEPEPPRVLFEFDNVVLTPHVGGISPQAIHASVVRFIENAKLHLAGKPLLSRVN

SEQ ID NO: 35794 - protein, 565 aa, Burkholderia xenovorans LB400
MRDFLTSITARAGVLKGILPLNRAAAARDALAGVQLASMDIPQVLGYARIAGMPAVTGLYTVFLPLIAFAFFGASRHLVVAADSATATIFASRLSTMAPASSAEYAALAATVALLTGVLLFIARIFKLGFLADFLSRTVLVGFLAGVGVQVGISMLGDMSGVPGRASRSIDQLMLVVRETAQIHWPTLAISLLVVGTTLAFKRIRPRLPVPLIAVVAGIAASDLYHFSAHGIAVLGPVAGGLPPLRMPQVTWQQVLDLLPVAASCFVMIVAQSAAASRVFAERYHESVDTNADLLGIAVANAAAAFSGAFVVNGSPTQTAMGDIAGTRSQFAQLVFAAVAVAVLLFFSRFLQYLPHCILASIVFTIAIGLINLRTLFAIRRESPGEFALAVFTAAAVVLIGVEHGILVAVALSLLRHVRHSYRPHTMILVPGDNGVWVPEPAVPGMQTRPGLIVYRFGADLFYANDHFFVDDARRLIDQAPSKVRCFVIDASAITDIDYSAARSVGELCATLKHAGIEVFFARVNQYLRSDMDRHGITPIIDASCIFNTLHEALRAAGVVSPTGT

SEQ ID NO: 35795 - protein, 194 aa, Burkholderia xenovorans LB400
MILSDEALAQLFREARTHNGWQPKPVDDAVLRQLVELVLLGPTSANSSPGRFVFVKTQEGKEKLRPALSAGNLEKTMAAPVTAIVGMDMAFYEHLPKLFPHADARSWFAGNDKAIADTAFRNSTLQGGYLILAARALGLDTGAMSGFDAARIDEAFFAGTTVKSNFLINLGYGDPSRLFPRSPRLAFDEAARIV

SEQ ID NO: 35796 - protein, 310 aa, Burkholderia xenovorans LB400
MKPSLLVLIHLNDASRASIEAAFDVIYAPDAAARSAAIDAHGETIRAVLTNGTTGLTAAEIDRMPQLELVSALGAGYENLAVDHARSRDIVLVNGAGTNDDCVADHAFALLLAVVRDVPQLDQATREGVWRDTLPMRPNVSGKRLGIVGLGNIGSKVARRGVGFDMEIGYHNRKPREGSPHKYFDNVEALARWSDFLVVATPGGADTRHLIGQTVLGALGPQGFVVNVSRGSVLDTAALAQALTAGTIGGAGLDVYEGEPNPPEALLKLRNVVLTPHVGGRSPEAITASVDNFLSNASRHFAGEAVLTPI

SEQ ID NO: 35797 - protein, 418 aa, Burkholderia xenovorans LB400
MRDHATLQLSPEPAPDHAASRVTQPRFWETLPARWNSDTDDTLVCCQVRQETHDVKSFLFRAPSGRAFVFEPGQFITLELEIDGEPINRCYTISSPPTRPHTISITVKRVPGGKVSNWLHDNLHAGAEVRVLGPAGEFTCARHPARKFLFLSAGSGITPLMSMSRAHHELGEDSDIVFVHSARTPDDIIFARELDLIASNQAHFRTAFVCERLGARTNWPGVTGFLTLPLLKLIAPDFLEREIFICGPAPYMQAVRKLLDEGGFDRRHYHEESFSFGTVSEVAAQLTTAHVADALQSASAPVTAGSFTEAREEAAGFTPASAPTPADVEAETRFKVSFAKSHREIECGSGQNVLDAAKKAGVRLPASCTQGMCGTCKVKLVSGEVAMKHAGGIRQREIDQGMVLLCCSKPLTDLVVDK

SEQ ID NO: 35798 - protein, 272 aa, Burkholderia xenovorans LB400
MNLRVLGAVIAGSLLVMSAAAHADRLDDIKKAGVLRVAAFDSNPPFGFVDPKSNQIVGLDIDYARAVANRLGVKLEVQPTNPANRIAFLKSGKVDLVFANFTITDDRKKEVDFSIPYFASGTQFIAKKGTLTSPQQLNSLRIGADKGTTNEQQVRAQFPGATIIAYDDTPFAFAALRTGNVQAITQDGPKLVALLAKVPDKANYEIPPFTISNDYEGVGVPKGETRLLNVVNDTLKDLEAKGTAGQIYDTWFGPKSAAPLPRLFKIGDPQKS

SEQ ID NO: 35799 - protein, 396 aa, Burkholderia xenovorans LB400
MCQLPMSRREWLKLASMFTVAGAGPLLGALNARAATDPNAPVRIGYLPITDATPLLVAHNNGYFEAAGLAVEKPTLLRSWAQLVEAFLSGQVNVVHLLAPMTIWARYGSQAPAKVVAWNHVNGSALTVSPDIGKVADLGGKTVAVPFWYSIHNVVVQDMLRTQGLVPVLKKDGELKPNEVRLIVMAPSDMPPALASRQIAGFIVAEPFNAAAEGLKIGKVLRFTGDVWKNHACCVVFMHERDLTERAAWSQKVVDSVVKAQLWTRAHPQEAAQLLSKTGQNHYTPHTAAVLTEVLAPAPGDQGRYLADRAIIHADWHAKRIDFQPYPYPAYTEELVRRLKTTQLEGNAPFLGQLDPAFVARDLVDDRFVKNSIKSAGGMQAFGLPEGFSRTETIVV

SEQ ID NO: 35800 - protein, 381 aa, Burkholderia xenovorans LB400
MIYLDHNATTPPAPAVVQAMLSVLTDVWGNPSSQHALGQQAKGALAAARASIARMLACKPAELVFTSGATEANHLAVCGLHAAAPQGRHRVVFSAVEHAGHLKLARALAARGIALDCIAVRPDGSLDLDSAAALIGPDVAVVSLMAANNETGVVMPVAEVRDLAHAAGARLHVDATQLIGKLPFDFARSGIDAVSLSAHKLRGPKGIGALLVRQGVTLTPQVQGSQERHRRGGTENLPAIAGFAAGLERLGDVASEAARVGMLRDALEQGLKRALPEVHVFSAQAARLPGTSYLRFGLLPAEVVLQRLGRLGVAASSGSACSSGGSEPSHVLTAMRVPRDEALAAVRLSLGETTTAQDIQYLLAHLPPLLRPLLAQPACSA

SEQ ID NO: 35801 - protein, 417 aa, Burkholderia xenovorans LB400
MPDLQRVASTGPRLRGAHPVYLDHAATTPVDPRVVRRMLPYLTEMYGNPASRSHAYGWVAEEAVELAREQVSSLVNADPREIVWTSGATESNNLAIKGAAHFHRGKGNHLVTLATEHKSVLDSMRELEREGFEVTVLPVQESGLVDLAVFAAALRPGTVLASVMLVNNETGMIQDIAALGTLCRERGVLLHVDAAQAAGKVPIDLAALPVDLMSFSAHKIYGPKGIGALYVGRRPRVRIASQMHGGGHERGMRSGTLPTHQIVGMGEAFWLARENMASENTRIQTLRERLWSGLQKIDAVELNGDAGRRAPHYLNASFNYVEGESLLMGIKEVAVSSGSACTSASLEPSYVLRAMGRNDELAHSSIRFSIGRFTTADEIDFTIDLITQVVARLRAMSPLWDMVQAGVDLRTIQWAEH

SEQ ID NO: 35802 - protein, 323 aa, Burkholderia xenovorans LB400
MSHSAVASIAVLDDYQQTARSFADWASLAPRAQAVFFHDHVADPDSLAARLAPFDVVVLMRERTRLDAALLARLPRLKLIVTVGMWNAAIDLLAARERRIVVSGTTGGEAAATPALTWALILAITRNLHAEATSLRAGGWQVGLGVDVNGKTLGLLGLGRIGQAVARLGQAFGMRTIAWSQNLTAERAAEHAVERVDKDQLFRDADVLSVHLKLGERTCGIVGERELALMKPSAYLVNTSRGPIVSEAALIAALQARRIAGAALDVFDEEPLAPHHPYRFLPNVLATPHIGYVTENTYRTAYPQIVEGIQAWLDGTPVRELPL

SEQ ID NO: 35803 - protein, 388 aa, Burkholderia xenovorans LB400
MTMRTQDGAEDQTILVLNSGSSSLKFGLFRRTGGDESLLLEGSAEGIGRSDGSLRIKSPDGRVLVQQEHELESQTDALQKLARVLAQQRHARPSAVGHRVVHGGPHLRAHQRITPEVRRQLQDAVHFAPLHIPPALALIDEAETIFADAPHFACFDTAFHATLPPRAAQLALPRRYVEAGVMRYGFHGLSYESLVTRLGAGLPARAVFAHLGNGSSVCALRNGQSVDTSMGLTPTGGVPMGTRSGDLDPGVLLYLMRVEKLDAGALETLLNRESGLAGYAGGESDMQALEKRAAAGDTNASLALDAFATAVRKTIGGYAALLGGIDLLVFTGGIGEHSEEIRRRVCDGLAFMGLTENDPAGKVRAIHTEEEKQIARHCRTLLRQTDAA

SEQ ID NO: 35804 - protein, 490 aa, Burkholderia xenovorans LB400
MSALIIIAAITLFALYLGVRARRGHDMSLEQWTVGGRSFGTAFVFLLMAGEIYTTFTFLGGSGFAYGKGAPVYYILAYGTLAYILSYWMLPPIWRYAKKHRLVSQPHFFTRKYESPALGTLVALVGVAALIPYLVLQLKGLGIIVATASYGAISSTAAVWIGACVVTAYVIVSGVRGSAWNSVVKDLLILAIVLFLGIYLPLHYYGGFSDMFRAIDAARPGFLTFPAKGSSVTWFQSTVLLTALGFFMWPHTFGSIFTAKDERIFRRNAMVLPLYQLILLFVFFVGFAATLKVPGLKGGDIDLSLFRLSLQTFDPWFVGVIGAAGILTALVPGSMILTSASTLLANDVYRGMVSRNASDATVAMLARVLVPVVALVAVAFTLQGGETIVALLLMGYSFVTQLFPAVICSLRPHNRATKQGAFCGIVAGVAVVAVTTTMHLSIGQLMPFLPDALKDVNIGFLALAVNIIVFAAVSAVTQPRPVEQTHAPVH

SEQ ID NO: 35805 - protein, 510 aa, Burkholderia xenovorans LB400
MPQPCPPHRMLGPSRDAKPVSVLNQATPSPVLSDAAPTPRPSACPGLLRIVAARDGGICRIKLPGGELSAAQARAIAEASARHAAGVIELTNRANVQVRGVKRGEEAVLIAALVGAGLGPTSIAADDVRNVMISPAAGRDPSALLDTRPLCAALLAMLQSEARFAALSPKFALLLDGGERLARVDHPHDVWLAASRETDGVRFVFGLAGCPPASASASAAANASAAAFSGSPTQSDHITTEQSHANGTGPLAAILPSQASALVRALLLTFLDLAAADTTRMRHLLTLHSAHALLHHAQQYVDFPLTRNVSPADWHRSTPADAGLRLGAHAQRQPGTWHVGGQPASGRLDADTLHALAALSQQHGDGTLRVTPWQSVLLPDIATHAVPPVLSGLNALDLACDPAQAITRLIACAGSSGCAKSLADTKTDALRLARRLPAGVEAHLSGCPRSCAAAHCAPYTLLAAAPGLYDLYRRDRHDGRPGFGECVARQLTIDQAADMLDRLARSNTNA

SEQ ID NO: 35806 - protein, 392 aa, Burkholderia xenovorans LB400
MKYSNLVERLQGRRTSAWEIHRVAQQAAANGEDVIVLSVGDPDFATPAPIVERAVEALRGGDTHYSAVSGREPVRAAIAEEHARTTGCAVSAANVILTAGAQNGVFASSLCLLEAGDEVIVPEPMYLTYEACVRAAGATLVAVPVDRARAFHVDCEALEAAVTSRTKAIFFATPCNPTGVVMPRADLERIARIACEHDLWVLSDEVYAELTFERGHLSIAALPGMAERTVTLGSLSKSHAMAGWRVGWAIGPAELIEHMGRLALAMLYGLPGFIQQAALTALQNKAQIAAGMREIYRRRRDVVFERLQRVPGLRCVLPEAGMFMMVDVSGTGLDTVDFTWQLFRAQGVSLLDASAFGETANGFVRLGFVVEEARLIDACERIAAFVRALPAR

SEQ ID NO: 35807 - protein, 385 aa, Burkholderia xenovorans LB400
MNTPTSTALAASSASGKLEKTHLRLGFVALSDAAPLVAAKLLEFGHAHGLTLELSRQPSWAAVRDKLLSGDLDAAHALYGLVYGVQLGLGGPQTDMAVLMVLNRNGQAITLSNRLADALAEHGTLPKALATLGRKPVFAQTFPTGTHAMWLYYWLASQGVDPLRDIESVVIPPPQMVAALAEDKLDGLCVGEPWNAQAGAQGVGRTIAYTSDVWPDHPEKVLACRRDFVSANPNAARALVQTMLEACRWLDGAGHREEIAHWLARPDYVGIDATLIAARLGNEIAASAPGGLPVRFFDNGAVNYPRAFEGAWFLTQFERWGMIDARADYADIAARINQTQLYREAAAAMNVAVPEESASQVLIDGETWDSGTSPTGYARRFPIRR

SEQ ID NO: 35808 - protein, 322 aa, Burkholderia xenovorans LB400
MTELVYGDGAIRRASLYGSSIENTYAGVLSFMRRKYTRELDGVDVVVSGVPLDLATTFRSGARLGPAAVRAASVQLSELHPYPWGFNPFDDLAVTDYGDCWFDAHNPLTIKASIVEHARTILRSGAKMLTLGGDHYMTYPLLIAHAEKYGRPVSLIHFDAHCDTWADDSPDSLNHGSMFYKAVKDGLIDPETSVQIGIRTWNDDFMGINILDAAWVHEHGTRATVERIASIVGERPAYLTFDIDCLDPAFAPGTGTPVAGGLSSAQGLAIVRALGALNLVGADVVEVAPAYDQSEITAIAAAHIACDLLCLWRQRKVAQRGA

SEQ ID NO: 35809 - protein, 691 aa, Burkholderia xenovorans LB400
MSANSTDNAVSPWHAGELKLQRAVGVAERMQEVGRRVIRRLMPDQHRAFFPQLPFVALGAVDHEGDVWATLVAGKPGFLHAPTARTLRVDLVRDPHDPASAGLDDGEAVGLLGIELHTRRRNRLNGTVSHSAGAGFNVDVTQSFGNCPQYIQMRDAEFVRDPASPPPVEAVQLEHLSERARTMIDTADTFFVASYVDDPAGRQVDVSHRGGKAGFVRLSEDGVLTIPDFAGNLFFATLGNFVINPRAGLVFADFESGDLLQLTGEAQVDLDSPEIAAFQGAERLWRFKPRRIVYRAGALPLRWKLQANGWSPNSLMTGSWDEVASRVKAQALADAWRPFKVTQVVDESSVIRSFYLEPLDGAGLIPHAAAQHLPIRVTLPGCTKPVIRTYTLSTAPADGSYRISVKRQGLVSAHLHDTLRVGSVIEARAPAGQFTIDAAARRSAVLLAAGVGVTPMLAMLRHIVYEGLRTRRVRPTWFFHSARTLAERAFTKEIDQLAASAGGAVRVVRTLTDTEGAQMGKDFDASGRLDVELLRATLPFNDYDFYLCGPAGFMQSLYDGLRELNVADNRIHAEAFGPAGLHRRADAGADAGLAHLPADKPVPVAFVKSGKEARWNPDSGSLLDLAESRGLSPEFGCRGGSCGTCRTRVLEGAVAYPVAPEFKVASDEALICCAVPAQAGTSGAERLLLDL

SEQ ID NO: 35810 - protein, 595 aa, Burkholderia xenovorans LB400
MYQYTEFDKSFVRSRAAQFRDQVERWQSGKLSENDFRPLRLQNGWYVQRHAPMLRVAVPYGELSSSQLRVLARIAREYDEPEAEVYRLACEAQRKLGTLRLPTHYAHFTTRTNVQFNWIPLSKAADVMDLLASVDMHGIQTSGNCIRNISCDERAGVAPDEIADPRPFAEIMRQWTTLHPEFAFLPRKFKIAITGAAEDRAATEWHDVGLRLIRNEAGELGFRVTVGGGMGRTPMIGAVLREFLPWQQIMNYIEAVVRVYNRYGRRDNKYKARIKILVKAEGQRYVDDVNEEFRQIVEFDGGPHTIAQAELDRVSASFVPPALHKRTPANVGGVRPDLHAQAEIHPRFGKWLERNVALHKDPQMRVVTLSFKRLLQAPGDASADQLDTVAELAARYSAGEARVTHTQNVVLPWVHVDDLFPLWQAASDADLASANVHLLTDMIACPGGDFCALANARSIPVAQAIAERYQDLDELDDIGEIDLHISGCINSCGHHHSGHIGILGVDKDGQEWYQVTLGGADGENSSGVAQPGKVIGPSFSAHEIPDVVEAILSTYRDVRSADGTRETFIQTVRRVGLEPFKLAANGARCKTEVSL

SEQ ID NO: 35811 - protein, 339 aa, Burkholderia xenovorans LB400
MEHSIALQFEDGVTRFITCRDNETLSDAAYRQKVNIPLDCRDGACGTCRGFCESGQYDLPASSYIEDALTADEAAQGYVLACQTRPRSDCVIRVPASSAACKTGVSKHAGKLAAIDRLTDSTIHFSIDVDEPQQLGFLPGQYVNVDIPDSDTFRSYSFSSAPGAAQAAFVVRNVPDGRMSRYLCEQAQPGQRITFSGPYGSFYLREPVRPVLFLAGGTGIAPFLSMLQVLSASGSPQPVRMVYGVTHDRDLVGTAQLDEAQRAIGQFEYRTCVADAASDHARKGYVTQHVDPAWLNGGDVDVYLCGPVAMVDAVQTWLRETGITPAHFFYEKFSASNLA

SEQ ID NO: 35812 - protein, 493 aa, Burkholderia xenovorans LB400
MSDLNPVNPVAMTVFIAFFVLVTVIGFFAARWKRGDLTQLHEWGLGGRQFGTVISWFLVGGDFYTAYTVIAVPALVYSVGAYGFFALPYTIIVYPFVFAVMPKLWKIAHAKNHITAADYVQGEYGGKWFPAAVAVTGIIATMPYIALQLVGMQVVIKGLGVTGEMPLIVAFVILALYTYASGLRAPAMIAFVKDIMIYIVVIAAVWLIPAKLGGYAHVFDAADTYFKAKGGATGIILKPTQFTAYASLALGSALAAFMYPHTMTAVLSSSSANTVRKNAIFLPAYTLLLGLIALLGYMAIAAGVHVKSASDMVPALFNTLFPSWFVGFAAAAIAISALVPAAIMSIGAANLFTRNLWRPLVSPNISPEGEASTAKIVSLVVKFGALLFIVFLPTQYAIDLQLLGGVWILQIFPAIVFSLYTRRLNTPGLFLGWLVGIVIGSGLAISQGLKPVFALHLGDAVYPVYIGLIALVANIVVSFVVSVLSPRRVVATA

SEQ ID NO: 35813 - protein, 395 aa, Burkholderia xenovorans LB400
MTNQREVVICNPVRTPIGAFGGSLKEVPATELGAIAVRETLRRSGLDAAALGSVVMGNVIQAGNRMNPARQASIGGGVPVSVPALTVNRVCGSGAQAIASAAQEILLGLGDVAVAGGMENMDRAPYLLDGGRWGYRMGNAQIHDSLLRDGLNDAFSGEHSGWHTEDLVAQFDITREAQDRWAARSQQRFSEAQARGDFDAELVAVETAGRKGPQHFTRDEQPRPDTTVETLAKLRPAFRPDGTITAGNAPGLNSGAAAMLVAGRGFAEAHGIEPFARLVAYGVAAVEPGMFGLGPVPAVEMALARAGWQLHDVERFEINEAFAAVPIAVARRLGIADELINVQGGAIAHGHPIGATGAVLTTRLLHSMRRDGLKRGIVTLCIGGGQGIALALEML

SEQ ID NO: 35814 - protein, 305 aa, Burkholderia xenovorans LB400
MNHPTAQPAPSTVRRVAFLGLGVMGYPMAGHLAKAGLDVTVYNRTASKAQQWVAEYGGRAAATPREAADGADLVLACVGNDDDLRSVTLGENGAFAGMARNTAFVDHTTASANVARELAEVAGQKDLHFIDAPVSGGQSGAQNGKLTIMCGGEPAVFEQASPVLAHYAAAVTLVGAVGAGQLAKMVNQICIAGVVQGLSEAINFGQLAGLDMPLVLEVIGKGAAASWQMDNRGKTMIDGKFDYGFAVDWMRKDLGFCLDEAKRNGASLPVTALVDQFYADVQALGGNRFDTSSLIWRLRALKPAR

SEQ ID NO: 35815 - protein, 345 aa, Burkholderia xenovorans LB400
MKAINRIIEQARRSPMRIVLSEAEDPRVLQAAQRASHEGIARILLAGDAARIREAAARFDVDLSGMELVDPAASALAASYADELFALRGNKGMTPEQAQREILNPLCFANLMVRLGHADGSVSGAVNTTAEVVRTALQIIGIAPSFKLVSSFFLMMLCEPFHTLKGGLIFSDCALVVEPDAGQLAEIAIAAADSAKSLLMDEPRVAMLSFSTSGSAHHAAVDKVVNATHMVQERRPHLAIDGDVQLDAAIVSEIALRKVKHSQVEGHANVLVFPSLEAGNIGYKLAERIGGAKAIGPLLQGLRKPANDLSRGCSADDIYYVIAVTAVQAQAALTHPDALLTPSHS

SEQ ID NO: 35816 - protein, 160 aa, Burkholderia xenovorans LB400
MRRVIVRRSSVHGKGVFAMRPLAAGERVLEYKGEITAWRDAVRRHRREGVEGHTFLFGLSDGRVIDGGRGGNSARWLNHACAPNCETIEDGNRIFIHTLRPVHAGEELFIEYLLAIDDPSDEEVRAQYVCRCAAAGCRQSMLADRDSDQTEARSRLRRSR

SEQ ID NO: 35817 - protein, 395 aa, Burkholderia xenovorans LB400
MQREVVVVSGVRTAIGKFGGSLKDVAPTELGALVVREVLARAGVAGDKVGQVVFGNVIATEPKDFYLARVAALNGGVGQTTPAFNVNRLCGSGLQAIVSAAQSILLGDADIAIGGGVENMSRAPYIAPDARFGARMGDARLIDMMLGALSDPFHTVPMGVTAENVAKKYGITREQQDALAVESHRRAAHAIAEGRFKDQILPVTRTVKGRPVVFDTDEHVRLQLDPAEISGLRPVFQKENGTVTAGNASGINDAAAAVLLMSREAADASGVKPLARLVSYAHAGVDPLYMGIGPVPATRLALQRAGLGIGDLDVIEANEAFAAQACAVAQELEFDPRKVNPNGSGISLGHPIGATGALITVKALYELQRIKGRYALVTMCIGGGQGIAAIFENLQ

SEQ ID NO: 35818 - protein, 397 aa, Burkholderia xenovorans LB400
MNAPLLLTFNPGSSTVKIGLFRVVAGEATRIGQGMIDFRHKPLQLHLVNGGETLDIALQSAVTEDLHDVLDETLGWFATHFSLDDLVSVGHRVVHGGDRFAGPVAITDETLAAITELVPLAPLHQPQSVRLIRAIRHLRPHLLQAASFDTAFHRTQAALVQRFAIPRGLFDKGIKRYGFHGLSYQFIHGQLELQFPQLASGKVIAAHLGSGASLCAFEDGASRDSSMGFSTLDGIPMATRCGALDAGVVLHLLEQQGLSVKEVEHMLYEQSGLLGVSGISADSRELEASHRPEAREALELFAFRIAGEAARLAATLGGLDSLVFTAGIGEHQPAVRLAVCERLAWLGIELDRDANDSNACVISSARSQITVLVLPTDEEQIIANEAIAVLHNEALKS

SEQ ID NO: 35819 - protein, 580 aa, Burkholderia xenovorans LB400
MRMQIGAFLARRLTEAGVRHLFGVPGDFNLSFLEQIQEADGIEFVGNCNELNAAYAADGYARTSGIAALVTTFGVGDLGAIGGIAGAYAENVPVVHITGTPPLHAVNSRALVHHTLVNGDYDNIGRCMSEFTVAQTRITPANAAFEIDRVLRSCWLERRPVHLQLPSDVTHVVVEVPEAPLMLADPSSDPHQLREATRRIVEALASARFPAIVVDADADRFGVTELVQKLAEKCSIPCASLTPAKSALNETSRHYVGTYVGAASAEPVRSIVENADCLIGVGLRFTDTSTALFSQHFNPEAFIDLRRHDLSLGTTQIPGVTLRDVLARVVDDAQPVVRERATQALAAASDALPASSGNVPLTHAALWPRIRRFLKPRDVILGEAGTSHASLSAMKLPPGATYIAQPIWGAIGYTLPALFGSLVGTPSRRHLLFIGDGSFQLTAQELSSILRRDLKPVIFLLNNSGYTIERLILGEHSAYNDVANWHYAGLPHAFDRRERALSLVVETVADLEAALNRAESAEHLVFIELKLPMMDAPESLKKFADIFADFDYGERGPRNPSKLVASEAPAHGHSLTDETA

SEQ ID NO: 35820 - protein, 315 aa, Burkholderia xenovorans LB400
MKVKIVARREVAVGIAAFELMDPRGALMPAFSAGAHIDVHVSNGLVRQYSLCNDSRERSRYMICVLHDPETRGGSRAMHEMREGQTLEISEPRNHFPLASDSGHSVLLAGGIGVTPIVSMAFSLASEGASFEIHYCARGPSHAAFLDRFAEPDLRDRTRLYFDTSPACDRLRMQDVLATPSTEKHLYVCGPKGFIDAAVTTAMEAGWKTTNVHREHFSADPMPSGEAGSFTVRLAKNQRTVNVGPNERVIDALGKAGVFVPVSCEEGVCGTCLTGVLAGEPDHRDSYLTKRERTKNDRFLPCCSRSKTPLLVLDL

SEQ ID NO: 35821 - protein, 397 aa, Burkholderia xenovorans LB400
MNDPLLLTFNPGSSTVKIGLFSVSAERATRIGQGSIDFRHAPLSLHLVDGGGTREIALKAVVTEHLHEVLDETLNWFATHFSLTDLVSVGHRVVHGGDRFAGPAEITDATLASIVELVPLAPLHQPQSVRLIRAIRHLRPNLAQSASFDTAFHRTQTELVRRFALPRHFFDSGVKRYGFHGLSYRFIAGALTRRFPLLAHSKVIAAHLGSGASLCAMSAGASRDTSMGFSTLDGIPMATRCGALDAGVVLHLLGQPGMTPDALEKILYEQSGLLGVSGISADSRELAASTQPQAQEALDLFVLRIAGEAARLATTLGGLDCLVFTAGIGEHQPPIRAAVCKALAWLGVELDDAANARNAAVISSSASRVAVLVIATDEEQVIADETVSILHSQGATA

SEQ ID NO: 35822 - protein, 396 aa, Burkholderia xenovorans LB400
MCQLPMSRREWLKLASMFTVAGAAPLLAALNARAAENPDAPVRIGYLPITDAAPLLVAHNNGYFDASGLAVEKPTLLRSWAQLVEAFLSGQVNVVHLLAPMTIWARYGSQAPAKVVAWNHVNGSALTVAPDIGKLGELGGKTVAVPFWYSIHNVVVQHMLRAQGLVPVLEKDGELKANEVRLIVMSPSDMPPALASRQIAGFIVAEPFNAAAEELKVGKVLRFTGDVWKNHACCVVFMHERDLTERAAWSQKVVDAVVKAQVWTRAHPQEAAQLLSKSGRNHYTPHSANVLTNVLAPPPGDEGRYLADRAITHADWHAKRIDFQPYPYPAYTEELVRRLKATQVEGNAQFLHQLDPAFVARDLVDDRFVKKSIESAGGMKAFGLAESFTRTETILV

SEQ ID NO: 35823 - protein, 272 aa, Burkholderia xenovorans LB400
MKIWTRSAAVVGLLLTLSGVAHADRLDDIKKAGVLRVATFDSNPPFGFVDPKTNQIVGLDVDYARAVAAKLGVKLEIQPTNPANRIAFLKSNKVDLVFANFTITDERKKEIDFSTPYFASGTQFIAKKGVLKSPQQLDSLRIGADKGTTNEQQVRAQFPAATIVAYDDTPFAFAALRAGNVQAITQDGPKLVALLANVPDKEKYEIPPFTISNDYEGVGVPKNEARLLNVVNETLVGLEANGNAAKIYDQWFGPGSKAPLPRLFKIGDPQKS

SEQ ID NO: 35824 - protein, 403 aa, Burkholderia xenovorans LB400
MTRKLRVGVIGGGIGGLALTAALAQQGFDVRIFERTGSFGEVGAGIQVTPNAVKVLEAMGLGDALRKVAFLPQAIVGRNWDTAKEIFRIPLAEECPRLYNAPFFHVHRADLHHLLIDQVPAHAATLATACVDVRQTGETAVARFEDGSEFEADLIVGADGVRSTVRSKLFGETAPGFTGNMCFRAVVPVEGDFDFVTPDSSFWLGPKSHVVTYYVRGGKAVNIVAVNETADWVEESWNAPSSREELLAAFEGWHPNLIQLFERVESVFKWGLFDRDPMPAWSRGRITLLGDAAHPMLPFLSQGAAMSIEDGYVLARSLTAHGSDVASALRDYEAERLPRTSRVQLESRERGRTYHLPTRFAQSKRDLIYQFKSWLNPHASGIQADWVYSYNATDFTPRVAAVA

SEQ ID NO: 35825 - protein, 316 aa, Burkholderia xenovorans LB400
MDKAQEINLVVRAITQEADGVIGLTLAAADGQDLPVWTPGAHIGLLVDGGLERQYSLCSEPEDRRQWRIAVLREPESRGGSAWLHSRLQVGDILRATGPGNQFELVDADRYVFVAGGIGITPLLPMIRAVEARGAQWSLLYGGRHRSSMAFAAALEAYGERVRIQPEDQCGLLDLKAALGAPQAGVAIYSCGPERLLEAVEATCVGWPEGALHVERFRPRPGALEGESGSFEVVLAKSNLSCQVREGQTIIDALDTAGFHVPRSCGEGTCGTCVAKVLEGVPDHRDSFLMGKKRAANQTICVCCSRSLTPRLVLDL

SEQ ID NO: 35826 - protein, 590 aa, Burkholderia xenovorans LB400
MGCRGLHRENVKRSELVKTVQVGRAIVNALRAEGVDALFGMPGGHVIQIYDALYDTPEIRHYLVRHEGTAASMAAGYAQLTGRPAVCVVTAGPGATNVLTAVAEAHVASLPMVIIAGRGATTTSYRGASQEVPTEKVFAPVTKWSVRIDFADDAIPIVRRAFALARSGRPGPVYIDIPRDILALDCNVPDTYEPVSTLARPNASECILDKAFEALRAARRPIIIAGGGAVASNAFEAVRELAEALAIPVLTSLAGRGIISDEHPLSAGGLGTNRNDLSKQLLRDADVVLGLGTRFEEMETNWRVGFVPAEQACYIQVDIDPGEIGRSVPASIGIAGDIKAVVSSLLTRIKDAGVGLKAGAYATHPRTLDCVKTIQRIEREIDEVASSVESPIHPFRVIRAARAVFPRDTTVAIDVGCLSQHMVGAHPIFRVFEPRSLIVPSSFYGMGFATNALPAASIVYPDRPALGFSGDGSFQMVLPVLPVAAQYKLAVTWVVLNDQALGSIRDIQKYVYKSRFVDTDFEFQPDFATIAKGCGCYGERIEKADDVEAALKRALAANRAGIPAVLDFSVFSARTQGTLDHYVAYGLARD

SEQ ID NO: 35827 - protein, 421 aa, Burkholderia xenovorans LB400
MGRSPLTSFERPLVQTPTPEREFSVTGNTDIFVVAAARTAIGTFGGSLKDVPLAQLAILAVRGTLERSGIAPSHVDHIVLGNVIPTEPRDAYLSRIAALEAGIPAQTPALNVNRLCGSGLQAIILAAQSLLLGDAQVAIGAGAESMSRGPYLLPALRWGARTGDVQAADYMLGILHDPLHRIHMGVTAENVAEREAITREMQDVLAVESQRRAAHAIAEGYFRSQIIPVEIPSRKGIVIFDNDEHVRPETTFEQLSTMKPAFKHDGTVTAGNSSGINDGAAAVVLATGNAVKDHGLKPLARLVSYGHAGVDPRLMGLGPIPATHLALQRAGLTTGQLDVIESNEAFAAQACAVTQALDLDPKKVNPNGSGISLGHPVGATGAIITTKAIFELHRTGGKYALVTMCIGGGQGIAAIFERTGP

SEQ ID NO: 35828 - protein, 324 aa, Burkholderia xenovorans LB400
MSEADITAAPGELEVVVRVRTEEADGIASFELRTADGSALPSFDAGAHIDVHLPGPMIRQYSLCNPPGERHRYVIAVLREPSGRGGSARMHDLKVGDLLIISHPRNAFPLDAENGTKLLVAGGIGITPLKAMAHALTLRGIDFELHYFARSVSRAAFRDALATEPFAAAVRFHFDGDGASLPLADETLAPERIAHIYLCGPTGFIDKVREQAIARGFAAERIHVEHFSAENNASCGRSFVVEAVRSGATVTVGENESIARALERAGVQVLTSCEQGLCGACLTPVLEGIPEHRDEYQTAAEKAENAKITICCSRARTPVLRLDI

SEQ ID NO: 35829 - protein, 389 aa, Burkholderia xenovorans LB400
MYINVAVLTETRAHERRVALVPSVAQKLIKLGARLHMQPGAGAAIHLDDAAFENVAFIADRTALVKDADVVLAVQPPALDVVSAMKEGAILVSFIYAHHEPALVKRLLEKKITCFAMERVPRITRAQAMDALSSQSALAGYYAVQLGSTHLARVVPKVTGAAGSIGPARVLVMGLGVAGLEAIATAHRLGAIVEGYDVRPETREQALSLGATFVDTGVDARGKGGYARELHADEKIKVAAVLTKHIQSADLIITTAAIPGKASPKLISHTQVLGMKAGAVIVDLSAEGGGNCDDTRPGETAQIGQITIVAPLNVPSLLGEDASELYAKNQYSLLALMMKDNVIEIDWSDEVLARTVLTHAGENKAEADGKTMKVATPPASAPAVAPTQA

SEQ ID NO: 35830 - protein, 394 aa, Burkholderia xenovorans LB400
MTRDTRDVVIVDAVRTPIGKFRGALAGVRADHLGALVIDELIRRAGVKPQAVNDVVFGCVTQIGEQSANIARTSVLGAGWPETIPGLTIDRKCGSGEEAVHIAAGLIAFGAADVIVAGGAESMSRVPMGSNRDLHGEAFGWMASERFELTSQGEAAERLCDCWALTRAQLDAYSVESHRRAAAAAAEGWFAREIVPVPVGQVREKSLEGEAALFAADETIRPGTNADKLATLKSSFRSDGRLTAGNSSQISDGAAALLLMSSDKARELGVKARARVRAVTTVGSDPTLMLTGPILATCQVLEKAGLGLSDIDLFEINEAFAPVPLVWMKEFGVPHAKLNVNGGAIALGHPLGASGARIMTSMLHELERRGARYGLQAICCAGGMGTATLIERLD

SEQ ID NO: 35831 - protein, 561 aa, Burkholderia xenovorans LB400
MPLSSHLFIRNMNLPVPVSSASHAMLSVFAANGIDRVFLVPGESYLGILDALGDFPSIDVVTCRHESGAGFMACADARLTRRPGVVMVSRGPGAANAAIAIHTAEQDAIPLILVVGQVPKQRLRKGAFQEIDYGRMYGSVAKHVIEVTEPEALAAAAFDAIRIAGAGTPGPVVLVVPEDIQQQAVEASAWRATPAVPTLPEPVRVLELAGRLERAQRPLVIAGGVLDVPGGREALRRLAEHFAVPVAVSFRRHDLFPNDHALYAGDLGLANPEEQMRLFESSDLVIALGSRVGDITTQGYRFPSHPVPAQSFVHCHPDSAVVNRHLAAEMGFVCDPASLAAALVASNPSPSVGGRRAQWCERLRDFATGYARWPEPAADGAARAVDVARILAKQMPGDAAICLDAGAFAAPVYRHFPFCFPRRLMAPLSGAMGYGVPSAIATQLRYPGQKTVCLVGDGGFLMTGNEIIAAVERRLPILFILVNNQCYGSIRIHQNRHYPGRHVGTSLSNPDFVRIAEAYGLQARRVTRECELDEAIAQAFAADEPCLIEVVTEPPGGPLPS

SEQ ID NO: 35832 - protein, 320 aa, Burkholderia xenovorans LB400
MNPLIAVRVARKRIEAADIASLILESADGAPLPPAGPGAHIDVHTPSGCVRQYSLCNLADEHGHYRIAVLRDSASRGGSISMHDDVLEGGKLSISAPKNHFPLREDARHSILIAGGIGITPVIAMASALHARGASFALHYRTRSAARTAFLRELTHGALAPHCALYHDDAPALRKLELMPLLEAAPPDTHVYVCGPKGFMDAVISTARAQHWSEDRIHFEYFAGVATPGANANSFEVVLAKSGQVVQVAPSQTIVEVCSAHGVAIPTSCLHGICGTCITRVLEGEVEHKDFYLTPQERASHTQMLPCCSRAKSHRLVLDL

SEQ ID NO: 35833 - protein, 460 aa, Burkholderia xenovorans LB400
MSRLVVVSNRTVDPRKTAAGGLAVAVRESLQRTGGLWFGWSGKIYDESDEMTSRRGVHVQTLGNVTLATVDLSQQDHDNYYLGYANGVLWPVFHYRLDLADFDTRFAAGYRRVNQLFAEKLLPLLRPDDIIWVHDYHLIPLAAELRAIGCGNRIGFFLHIPMPPPMIMAAIPEHEWLMRSLFAYDLVGFQGQIDVEHFTHYAESEANARQVGPQQLRAFNRTLRLGAYPIGIDVEEFVSLANGKEAREMFTRMRDEYSRRRLLLGVDRLDYSKGLPQRIHAFRELLAHYPENRDSATLIQIASPSRESVAAYDDLRRQMDSLCGAINGDYGELDWMPVRYIHRHVARKRLPGLYRASKVALVTPLRDGMNLVAKEFIAAQDPSDPGMLVLSRFAGAAEQLKEALLVNPYDTQGTAHAIQRALTMPLDERRNRHAALMKRIREHDVHWWSSSFLDTLQDIP

SEQ ID NO: 35834 - protein, 414 aa, Burkholderia xenovorans LB400
MNAPVPIEVLRQHLIDPEICIRCNTCEETCPIDAITHDDNNYVVKADVCNGCMACVSPCPTGAIDNWRTVLKADAYSIDEQFSWDELPAQNTTANAALDATAQANGDDETGETASGIEVDAARGSTVPPWSAAKPYVNLYTHKAPTTATVVGNYRLTDELADSDIHHIVLDFGTLPFPVLEGQSIGILPPGTTKDGKPHHARQYSLASPRDGERPRYNNVSLTVKRVTRDYQDNATDGVCSNYLCDLKKGDKVTVIGPFGSTFLMPNHPDSHLLMICTGTGSAPMRAMTEYRRRRRLKGATGKLMLFFGARTKEELPYFGPLTNLPKDFIDTNLAFSRTPGQPKRYVQDAMRERAVDIAQLLKSDGTYIYVCGLKGMEDGVLQALQEIAERNGLDWATLWPRLRREGRLHLETY

SEQ ID NO: 35835 - protein, 393 aa, Burkholderia xenovorans LB400
MYREALIVSAARTAFTRSWKGSFNTTYGATLGAHAVRAALARSGVEAGAFEDVLMGCGNPEGTTGGNIARQIGLLAGLPTKVPGMTLNRYCASGLQTIALAAQRIWTGEGEVFMAGGVESISCVQKYANSFMAEDPALKASHPSSFDTMLQTAEVVARRYGITRERQDLFGVRSQQRACAAAEAGLTADEIVPVRATMTRVDPQTGEASTVDVLVDGDEGLRPATTYEALAAIKPAIEGGVVTGGNASQFSDGAAAVVVADSRYAERHGVQPLGAFSGFAVAGVEPDEMGIGPVQAVPKLLARAGLRVEDIDLWELNEAFASQALYCIDRLGLPEERVNVNGGAIALGHPYGASGTRLCAHALIEGRRRGAKYAVVTMCVGGGQGAAALLKVY

SEQ ID NO: 35836 - protein, 391 aa, Burkholderia xenovorans LB400
MNVAIIGGGIGGMCAALSLLQRGVNVTVYEQANELKEVGAGLRVTPNASRILRRMGLGEILHQSAIQTTELLYYRWEDGRVLAQQVLGNSIEIKFGAPYYHIHRAALHQLISDAVPREHIKLDQKCVRIEPMGDALGVHFANGDVAQANVVIGADGIHSVVRKQLHGEDRPRFSGDVAYRGLIPATRLAEWTRAPTQKIWVGPNSHFVQTYAGPDYINFIALVPGVADRESWSREGSLSELAEKFHGWDERIHELLANTDRVMCWPLYDRDPLPQWTVGHVTLLGDAAHPMLPYLGQGAAQAIEDAALIGKCLAGVTPQEVPTALAVYERLRRTRTAHIQLGARSEGNIYHLPDGQEQRKRDAAFQEMTGANASRDEWLFAYDVLAEPQPQ

SEQ ID NO: 35837 - protein, 146 aa, Burkholderia xenovorans LB400
MRRVIVRRSSIHGKGVFAMRPLAAGERVLEYKGEIMAWREAVRRHRREGVAGHTFLFGLSDGRVIDGSRGGNSARWLNHACEPNCETIEDAGRIFIHTLRPIEAGEELFIEYLLTVDDPVDDDIRRQYACRCAAPGCRQSMLADAA

SEQ ID NO: 35838 - protein, 575 aa, Burkholderia xenovorans LB400
MAIIPNLRTRSIRGEAYVPPAPRAYIDTLFDYATFTNALATSPIGKLTGSQASSPIAIIGTGLAGLAAAYELLRAGATNVTLFEASNRSGGRTYSAVFNANQPEFIAELGAMRFPPTEFALFHYLNAFGIPVSGDFPDPGIVDTTISYQGQTYSWAAGSPPPSIFNTVYNGWNAFLANGATVDGVTLASPDSITDLLTQGNLAAANTAWQKYIDVFENESFYSGLFKIFNGPNPPGNTNWQHPADYQLFGALGLGSGGFGPLYPLGFLELVRMVIDGLETDQQFVLGGIESLATAFKQASFNGVPLGNLIKLGTPVTGVSVDSGSGVVALTIKGTTQKFSRAIVATSHRSAQISIGLAPGAPVTPQTYGALSELHSASSSKVIVMTKNKFWLNTPGLPANIQTDKLVRGVYFLDYSPGNPADPGVVILSYTWEDDSVKLLGIQDPQTLVKRLLQDVALINPDYAEQIVPINNDYDTYVKVIAWENEPYQYGAFKFNFPGDDILTQQLYYNYLLANNPSTDPYLYFAGESYSFHGGWTEGAITTGLNAATAVIKSLDGTLLINPNPLTDPGPGYNY

SEQ ID NO: 35839 - protein, 244 aa, Burkholderia xenovorans LB400
MTTLLDVRGLRKHYGPFTALNGVDLSIAPGEFHGLIGPNGSGKSTLLKCLAGAEIPSSGTVAFDGVDVSTLPPARRARRGISLKFQITSVLPQLSAYENVQLAAQAHAGFFQLLLSQVRHDTAVTVEQLLNQFRLADVADTPVAELSHGHQQWLEIAMALAIRPRLLILDEPTSGMSVEERRVTGELLSSLKRDGCSLLIVEHDLEFIRDLCHAITVLDQGEVVATGSVSEIQANQKVREAYLG

SEQ ID NO: 35840 - protein, 324 aa, Burkholderia xenovorans LB400
MSPPSAVASIAVLDDYQQTARCFADWASLAPRAQPVFFHDHVADPDSLAARLAPFDVVVLMRERTRLDAALLARLPRLRLIVSVGMWNAAIDLHAARAQRVVVSGTSGGDPAATPALTWGLILAITRNLHAEAASVRAGGWQVGLGVDVNGKTLGLLGLGRIGQAVARLGQAFGMRTIAWSQNLTAERAAEHGVERVDKDQLFRDADVLSVHLKLGERTRGIVGQRELALMKAGAYLVNTSRGPIISEAALIEALQARRIAGAALDVFDEEPLARQHPFRFLPNVLATPHLGYVTENTYRAAYPQIVEAIQAWLDGAPVRELPL

SEQ ID NO: 35841 - protein, 467 aa, Burkholderia xenovorans LB400
MKSESKNQHVGKVTHHELKQTLGTWQLWGIAVGLVISGEYFGWSYGWASAGTLGFVITAIFIAAMYTTFIFSFTELTTSIPHAGGPFAYARHAFGPTGGYLAGAATLVEFVFAPPAIALAIGAYLHVQFPGLEPKHAAMGAYLVFMALNIVGVQIAAAFELCVTLLAIFELFVFMGVVSPGFQWSNFTKGGWSGADTFSMGSFHGMFAAIPFAIWFFLAIEGVAMAAEEAKNPKRSIPIAYVTGILTLVVLAIGVMVFAGAAGDWTKLSNINDPLPQAMKFIVGEHSGWMHMLVWLGLFGLVASFHGIILGYSRQIFALARAGYLPEWLSRVHPRFKTPHRAIIAGGVVGIAAIYSDELIQFGGQTLTANIVTMSVFGAIVMYIISMLSLFKLRRAEPNMERPFRAPLFPVFPAFALVAAVICLATMVYFNFLVAIVFAIFLALGYVYFLMTRHQREAAPADALLEE

SEQ ID NO: 35842 - protein, 384 aa, Burkholderia xenovorans LB400
MQSAMQARSKLPDVGTTIFTVIGQLAAQYDALNLSQGAPNFAPDASLIDGVAQAMRAGHNQYAPMAGIAALREALADKVATLYGVHYDPASEVTVIASASEGLYSTISALVHPGDEVIYFEPSFDSYGPIVRLQGATPVAIKLSLNDFRVDWDEVAAAITPKTRMIIINTPHNPTATVFSEADVARLKAITRNTDIVILADEVYEHVVFDGAKHQSMACHAELAERSVIVSSFGKSYHVTGWRVGYCLAPAALMDEIRKVHQFMVFSADTPMQYAFVDALARRESYLGLSAFYQKKRDLLTDALRDSRFELLPSEGSFFMLARFRGFSEESDSDFVLRLIRDARVATIPLSAFYTDGTDSGLIRLSFSKDDATLIEGARRLCQI

SEQ ID NO: 35843 - protein, 463 aa, Burkholderia xenovorans LB400
MSLFRKKSVEHMIAASAQNAGLKKALGALDLTFLGVGAIIGTGIFVLTGTGAVQAGPALMISFLIAALACGFAALAYAEFASTIPVAGSIYTYSYATLGELAAWIIGWDLMLEYGLATSAVSVGWSGYLQSLLSGFGVSLPVALTAAPGALPGHDTLFNLPAFLVMMAITALLSFGVRESARINNIMVAIKVIVVLLVICVGVFHVTPANWHPFMPNGWNGVFGAAAVMFFAFIGFDSVSSAAEEVKNPKRDLPIGIIASLGVCAVLYVAVAAVVTGIVPSAQFANISHPVSYALQVAGQKWVAGFIDLGAVLGMLTVILVMAYGQTRVIFAMSRDGLLPARLSRVHPRFATPFFTTWLVGIFFGLIGAVVPLNVLAELINIGTLAAFSMVSIAVLVLRKTHPELPRAFRCPGVPVVPVLAVASCLFLMINLQAVTWVAFVVWLLVGMVVYFGYSRRHSRLSS

SEQ ID NO: 35844 - protein, 402 aa, Burkholderia xenovorans LB400
MSETHMSGTKADPIVIVGVARTPMAAFQGDFATLSAPQLGSVAIQAAVQRAGLKPEQIDEVVMGCVLPAGLGQAPARQAALGAGLPLATGSTTVNKMCGSGMRAAMFAHDMLAAGSVDVIVAGGMESMTNAPYLLPKARAGMRMGHGQVIDHMFYDGLEDAYEKGRLMGSFAEECAASFDFTREAQDAFAVESLARAKRANEDGSFAWEIAPVKVESRKGEVTIDRDEQPFKANIEKIPTLKPAFSKTGTVTAANSSSISDGAAALVMMRESTAKRLGVQPIARVVGHSTLAQEPAKFTTAPVGAIRKLFEKNGWRADEVDLFEVNEAFAVVTMAAMKEHHLPHEKVNVNGGACALGHPIGASGARILVTLIGALKKRGGKRGVATLCIGGGEATAMGIELV

SEQ ID NO: 35845 - protein, 318 aa, Burkholderia xenovorans LB400
MSSHDGLMVFTGNANPALAQEVVKILGIPLGKAMVSRFSDGEIQVEIQENVRGKDVFVLQSTCAPANDNLMELMIMVDALKRASAGRITAAIPYFGYARQDRRPRSARVAISAKIVANMLEIAGVERIITMDLHADQIQGFFDIPVDNIYATPVLLGDLRKQNYENLLVVSPDVGGVVRARALAKQLNCDLAIIDKRRPKANVAEVMNIIGEVEGRTCVIMDDMVDTAGTLCKAAQVLKERGAKQVFAYATHPVLSGGAGERIAASALDELVVTDTIPLGEEARSCAKIRSLTSAGLLAETFSRIRRGDSVMSLFAES

SEQ ID NO: 35846 - protein, 327 aa, Burkholderia xenovorans LB400
MIAKINGDRALALARDVLDIEADAVRALRDQLDDGFVGAVDFILGCRGRVVVSGIGKSGHVARKLAATLASTGTPAFFVHPAEASHGDLGMVTAEDVFIALSNSGETEELMAILPLIKRLGAKLIAMTGRPSSSLAQLADVHLNSGVAKEACPMNLAPTASTTAALALGDALALAVLDARGFGRDDFARSHPGGALGRRLLTYVRDVMRTGDDLPKVTPEATVRDALFQLTAKRMGMTAIVDHDDHVAGIFTDGDLRRVLEREGDFRQLPIASVMTAGPRTIGPDQLAVEAVELMERHRINQMLVVDEAGKLIGALNMHDLFSKKVI

SEQ ID NO: 35847 - protein, 399 aa, Burkholderia xenovorans LB400
MAKQLQDAYIVAASRTPIGKAPRGMFRNTRPDELLVHAIRSAVAQVPGLDTKVIEDAIIGCAIPEAEQGLNVARMGALLAGLPNTVGGVTVNRFCASGLTALAMAADRIRVGESDAMIAGGCESMSMVPMMGNKPSMSPHIFDRNEDIGIAYGMGLTAEKVAERWKISREAQDAFSVESHRRAIAAQQAGEFNDEIAAYTITERFPDLATGEVRVKTREVSLDEGPRAETSLEGLAKLRAVFANKGSVTAGNSSQTSDGAGALIVVSEKMLKEFNLTPLARFVSFAVRGVPPEIMGIGPKEAIPAALKAAGLKIDDLDWIELNEAFAAQSLAVIQDLGLDPAKINPLGGAIALGHPLGATGAIRASTVVHGLRRRNYKYGMVTMCVGTGMGAAGIIERL

SEQ ID NO: 35848 - protein, 184 aa, Burkholderia xenovorans LB400
MPTKKVVILDRDGVINVDSDAFIKSPDEWVALPGALEAIARLNQAGYRVAIATNQSGIGRGLFDMNALNAMHLKMHRMAAAVGGRIDAVFFCPHTAEDHCECRKPKPGMLKMITERFEVDPENTPVVGDAMRDLQAGAALGHPVHLVLTGKGRKTLAAGGLPEGTIVHDDLRAFALDFLADAQE

SEQ ID NO: 35849 - protein, 380 aa, Burkholderia xenovorans LB400
MHIGVPAETRAHETRVAATPETVKKYVTQGHRVTIQSGAGTGASFPDDAFTAAGAEIVDAAAAFGADLVLKVQSPTDAELPLLKRGAVLVGMLDPFNTENSSKLAAAGVTAFALEAAPRTTRAQSLDVLSSQANIAGYKAVLLAATLYPRFMPMLMTAAGTVKAARVLILGAGVAGLQAIATAKRLGAVIEASDVRPAVKEQIESLGAKFLDVPYETDEEREAAQGVGGYARPMPPSWLTRQSALVHERARQADVVISTALIPGRAAPTLISVETVQAMKPGSVLVDLAAGRGAEYEGRRGGNCPLTEADQVVIRHGVSIVGYTNLASMVPADASSLYARNLLDFLKLIITKEGALNIDLADDIVAATLLARDGEVARKA

SEQ ID NO: 35850 - protein, 653 aa, Burkholderia xenovorans LB400
MGKIIGIDLGTTNSCVAIMEGNSVKVIENSEGARTTPSIIAYMEDGEILVGAPAKRQSVTNPKNTLYAVKRLIGRRFEEKEVQKDIGLMPYKIIKADNGDAWVEVRDQKLAPPQISAEVLRKMKKTAEDYLGEPVTEAVITVPAYFNDSQRQATKDAGRIAGLEVKRIINEPTAAALAFGLDKNEKGDRKIAVYDLGGGTFDVSIIEIADVDGEKQFEVLSTNGDTFLGGEDFDQRIIDYIIGEFKKEQGVDLSKDVLALQRLKESAEKAKIELSSSQQTEINLPYITADASGPKHLNLKITRAKLEALVEELIERTIEPCRVAIKDAGVKVGEIDDVILVGGMTRMPKVQEKVKEFFGKDPRRDVNPDEAVAVGAAIQGQVLSGDRKDVLLLDVTPLSLGIETLGGVMTKMINKNTTIPTKHSQVYSTADDNQGAVTIKVFQGEREMAAGNKLLGEFNLEGIPPAPRGTPQIEVSFDIDANGILHVGAKDKATGKENRITIKANSGLSEAEIEKMVKDAEANAEEDHKLRELADARNQGDALVHSTKKALTEYGDKLEAGEKEKIESALKDLEETLKSGSSDKAAIEAKIEVVATASQKMGEKMYADMQAAQGAEAAAAGAAGAGGAGASAGGASQQQDDVVDAEFKEVKKD

SEQ ID NO: 35851 - protein, 332 aa, Burkholderia xenovorans LB400
MRIILFSSRQYDSDTFTEANASHRYELHFQESHLDSETAVLAQGYEVVCPFVNDHVDAAVLERLHAGGTRMIALRSAGFNHVDLDAAARLGITVARVPAYSPHAVAEHAVGLILALNRRLPRAAARTREGDFSLHGLLGFDLHGKTVGVVGTGMIGRVFGRIMAGFGMQVLAHDPGTPADDLLALGARYVPLDTLLAGSDIVSLHCPLVAGTYHLIDGPALARMKRGAMLINTGRGGLVESNALIGALKDGQLGHLGLDVYEEEGGLFFEDHSNLPLQDDVLARLLMFPNVIVTAHQAFFTREAMSEIAQTTLANVAAWRNGTPRNVVRAPV

SEQ ID NO: 35852 - protein, 267 aa, Burkholderia xenovorans LB400
MTRSTLRPARRAWLAALLLSPVLAITAPAAHADTLDNIAKAGVLKVAVPEDYPPFGSVGADMKPQGYDIDTAALLAKSMNVKLELVPVNSANRIPYLQTGKVDLVISSLGKTPEREKVIDFSTAYAPYYQGVFGPADIKVSGPADLTGKTVGATRGALEEIGLTQMAPNATIKRFEDNNATIAAFLSGQVQLIAAGNIVAAAILAKNPPRRPEPKFVIKNSPCFVGMNKNEPRLQQKVNAAIAQAKQDGTLNTMSKKWFGAPLPADL

SEQ ID NO: 35853 - protein, 559 aa, Burkholderia xenovorans LB400
MYQYDQYDQTIVDERVAQYADQVRRRLSGELSEEEFRPLRLQNGLYMQRHAYMHRIAIPYGNLRSNQMRVLAQIAREHDRGYGHFSTRSNIQYNWIKLEETPEILRKLAAVQMHGIQTSGNCIRNITADQFAGVAPDEVVDPRPWAEILRQWSTFHPEFAWLPRKFKIAVSGSKEDRAAVQIHDMGVYLKKNEQGELVADILAGGGMGRTPIIGAIIRKDLPWQHLLTYCEAVLRVYNRYGRRDNIYKARIKILVKALSPEKFSAQVEEEWQHLKDGPSTLTQAEVDRVSQYFQPPVYEKLADTDASYEKHLLENRAFARWVERNVRPHKVSGYASVTLSLKPTTIAPGDATDAQMEAVADWADEYSLGEIRVSHEQNLILANVKKRDLFALWEKAKAQGFATPNIGLLTDIIACPGGDFCSLANAKSIPIALAIQERFNDLDYVYDLGDVSLNISGCINACGHHHIGNIGILGVDKDGSEWYQVTLGGEQGTGASGAQLGRVIGPSFSAEEMPDVMSKVIDTFVENRHEGERFIETYNRIGITPFKERVYASRQPAHA

SEQ ID NO: 35854 - protein, 321 aa, Burkholderia xenovorans LB400
MSQHSPERIDVHLTQIRLEADDVASYEFRPVAGGPALPVFEAGAHIDLYLPENRVRSYSLVNDPQERHRYVVAVQREAAGRGGSAWMHRVPRVGERFTISAPKNDFPLCESARESLFICGGIGITPVVAMIRRLERIGASWRLHYAVRECSRAAYADDLAQLDNADSRVEMYFQNEDRRPDVRGIVDRAPAGTHLYCCGPRGMVDDFIAACAGRPQDEVHFERFAAANDAASEGGFEVVLHRDGRRIAVAPGKTILDTLLDHGVDVQYACSSGVCGTCRVGVIDGVPDHRDDFLSADEKAGNGAIMVCCSGSLSPTLVLDL

SEQ ID NO: 35855 - protein, 128 aa, Burkholderia xenovorans LB400
MQRNMLKSKIHRVAVTHCELHYEGSCAIDEDLLEAANIVENERIDIWNINNGERFSTYAIKGERGSGMISLNGSAARRAQLGDLVIIAAFAVVDEAELKAGWKPDLVFVDDNNRIKGSRDHVPTQNWT

SEQ ID NO: 35856 - protein, 342 aa, Burkholderia xenovorans LB400
MIFRAAFFHCRDTMNTSSFIHPDAGERPQPLSGNAMPRCGGIATMMRLPNVGSAEGFDACFVGVPFDLGTSNRTGARFGPRQIRSESVLLRPYNMATRAAPFDSLRVADLGDVAINPYNLHDSIARIETAYDEILQHDCKPITLGGDHTIALPILRAMHRKHGKVGLIHVDAHADVNDTMMGEKIAHGTPFRRAVEEGLLDCGRVVQIGLRGTGYAAEDFDWCRDQGFEVVQAEACWNQSLAPLMARVRERMGDGPVYITFDIDGIDPAFAPGTGTPEIAGLTVPQALEIIRGSRGLNIVGCDLVEVAPPYDPFGTTALLGANLAFELLCVLPGVEYRASTR

SEQ ID NO: 35857 - protein, 475 aa, Burkholderia xenovorans LB400
MSRLIVVSNRVAPTQEGRPAAGGLAIGVLDALKETGGVWFGWSGETVSEPSAPVIEKQGNVTYATVGLTKRDYDQYYRGFSNATLWPTFHYRNDLSRYDRQEYAGYQRVNATLAKQLKELLKPDDIIWVHDYHLLPFARCLRELGVKNPIGFFLHIPFPVPEVLRTIPPHEELVKAMCSYDVIGFQTDADRQSFVDFIERGQHGTSSEDGMVHAYNRFLKVGAYPIGIYPDAIAKAAEQFTDRKPVRSLRDGMRGRKLIMSVDRLDYSKGLVERFQAFERLLLNAPGWHGRVSLVQIAPPTRADVQTYQRIRQTLEGEAGRINGRFAQLDWTPIQYLNRKYERNLLMALFRQSQVGYVTPLRDGMNLVAKEYVASQDPADPGVLVLSQFAGAAEQLPGALVVNPFDLSQMAEALERALSMPLAERQARHADMMAPMRENNLSVWRDTFLADLRNVATASSVTAKAVKLADVTASS

SEQ ID NO: 35858 - protein, 772 aa, Burkholderia xenovorans LB400
MTKQSGTTSFREAALDYHEFPTPGKIAIAPTKQMINQRDLALAYSPGVAFACEEIVGNPLNAARFTARSNLVGVVTNGTAVLGLGNIGPLASKPVMEGKAVLFKKFAGIDVFDIELNESDPHKLVDVIAALEPTFGGINLEDIKAPDCFIVERECRKRMKIPVFHDDQHGTAIVVAAAITNGLKVVGKDIREVKLVSSGAGAAALACLDLLVDIGLPLENITVTDLAGVVYKGRVELMDPDKERFARETDARTLAEAIGGADVFLGLSAGGVLKQDMVKQMADKPLILALANPTPEILPELALEVRPDAVLCTGRTDYPNQVNNVLVFPFLFRGALDAGATTVTREMEIAAVNAIAELARQEQSDIVATAYGIQDLSFGPEYLIPKPFDPRLIVKVAPAVAQAAMDSGVAERPIEDMDAYEQHLQQFVYHSGTTMKPIFQLARSVEPEKKRIVFAEGEEERVLRAMQIIVDEKLAKPILIGRPAVIEQRIARYGLRLVAGQDYTVVNTDHDERYRDFWQEYHRMMSRKGISAQMAKLEMRRRTTLIGAMLVEKGEADGMICGTVSTTHRHLHFIDQVIGRKAGAKVYAAMNALVLPNRQIFLVDTHVNVDPTPEQLAEITIMAAEEVRRFGIEPKVALLSHSNFGTSNAPTAQKMRDTLAILRERAPDLQVDGEMHGDIALDANLRREVMPDSTLEGDANLLVLPNIDAANISYNLLKTAAGNNIAIGPILLGAARPVHVLTASATVRRIVNMTALLVADVIAFPKQAKPGT

SEQ ID NO: 35859 - protein, 516 aa, Burkholderia xenovorans LB400
MNATATFVFVLFFVGVTILGFIAAHWRRGDLAHLEEWGLGGRRFGTIVTWFLLGGDLYTAYTFIAVPALVFGAGATGFFALPYTILIYPFAFVVFPKLWSIAKRQGYVTSADFVSARYGSRMLALAIAVTGIVATMPYIALQLVGIEVVIGALGFDTKGFVGDLPLIIAFAILAAYTYTSGLRAPAMIAVVKDILIYITIFAAIIVIPPQLGGFGHIFSVVPPAKLLLKAPDVSSLNGYSAYATLAVGSALALFLYPHSITAVLSSKSGNTIRRNMAMLPAYSLVLGLLALLGFMALASGVKDMPEFAPYFKAFGPNFAVPALFLHYFPSWFVGVAFAAIGIGALVPAAIMSIAAANLYTRNIHKEFVNRNMTHEQETNVAKLVSLIVKVGAVAFILGLPLTYAIQLQLLGGIWIIQTLPAIVLGLYTRVLDYRGLLAGWAVGIATGTWMAISLKLAGSIFTIHLFGMAIPGYAAVWSLIVNLVVAVVVSLLVRAAGMQRAEDRTRPEDYLDVVEG

SEQ ID NO: 35860 - protein, 550 aa, Burkholderia xenovorans LB400
MKASDLFVKSLEAEGVEYVFGIPGEENLDLLESLRRSKIRLILTRHEQAAGFMAATYGRLTGRIGVCLATLGPGATNLVTAAAYAQLGGMPMLMVTGQKPIKSSKQGHFQIVDVVRMMEPLTKYTRQIVSVANIPAAVREAARQAEEERPGATHLELPEDVAHEEGDGKPIPKSYSRRPVAEEKAVARAVEAITGAKHPLLMIGAGGNRKTTTKMLREFVDQIGIPFFTTQMGKGVIDESHPMWLGNATLSDGDFVHRAIDHADCIINVGHDVIEKPPFFMRSGDAGEKTVIHVNFLGAEVDTVYFPQIEVVGDIANAVWQLKESLKQRQEHWDFTRFKEIKEHFEAHLVKGQHDDRFPMYPVRIVNDVYETTPVDGIVCLDNGMYKIWFARYYRAHEPNSLLLDNALASMGAGLPSAIATKIVHPDRKVMAVCGDGGFMMNSQELETAVRLRLDLVILILRDDAFGMIRWKQENMNFPDYGMTLSNPDFVAYAQSYGAKGHRIETAAEFAPLLRECFATPGVHVIDLPIDYSDNERVLNREIKRLSAQL

SEQ ID NO: 35861 - protein, 491 aa, Burkholderia xenovorans LB400
MSDTPVTPSTSTFDQFGLAPDILKAVKESGYTIPTPIQEQAIPVVLAGRDMMGAAQTGTGKTASFSLPIIQRLLPQASTSASPARHPVRALILTPTRELADQVAANVQAYAKHTALRSAVVFGGVDMNPQSEQLRRGVEILIATPGRLLDHVQQKTANLGQVQILVLDEADRMLDMGFLPDLQRILNLLPKERQTLLFSATFSGEIKKLAATYLRDPQTIEVARSNSTATNVRQIVYEVAEGDKTGAVVQLIRERGLKQVIVFCNSKIGASRLSRSLERDGVIATAIHGDRSQNERMQALDAFKRGEIEALVATDVAARGLDIAELPAVINFDLPFNAEDYVHRIGRTGRAGASGDALSLCSPNERKQLADIEKLIKRPLEVQRLTVEAPVRHHHEERAPRRERSSEGREDRGGRRRSGASSSGSFDRPHHHRAQPVDDFFLKPYEPSPASVRKVEEADAASAAPQKPASKQPLAALLGGFGMPRKSPSSS

SEQ ID NO: 35862 - protein, 597 aa, Burkholderia xenovorans LB400
MSAKPTLSKPIGSGEASSPAVVFRRLWPYIKPLIWVLIGAIVAMAVSAATDAAIPALLKPLLDKGFGAHANDRAKWFVPAAVIGLALIRSLSQYASGYLLAYVTNKILLDLRLKMFDRMIHTSVAFFQRETASTVINAIVFEVNQILNVLLSVLVTLVRDSLTVVFLLGYLFYLNWRLTLIVAVLLPAIGWLVGKINRRLRRLNREHQLLTNELSYIVEESVGGYKVVKVHNGEQYEMDRFESMSKRLRGYAMRMTVSGGLAQPLTQFLASIALAVVITIAVVQSSSDQTTVGGFVAFVTSMLLIISPLKHLMDVNQPLQRGMTACEMIFGLIDEPSEPEGGGKPLERAHGAVEFRDVSFVYSGNATHNRHTLDQISFRVAPGEMIALAGPSGSGKTTLVNLLPRFFDPTGGQILVDGVAIPEYDLHALRSQIAMVSQDVVLFNDTVANNVAYGQTADAGKVKAALRAANLWDTVEAMPKGIETLVGDNGMMLSGGQRQRLAIARAIYKDAPILILDEATSALDSESERHVQAALETLMKGRTTLVIAHRLSTIERADRILVMEAGRIVESGSHRELLAQDGLYAHLHRIQFQQSAA

SEQ ID NO: 35863 - protein, 587 aa, Burkholderia xenovorans LB400
MNMPSAEFSTSDTTPHPEADSIGATVLMKALADEDVEFVWGYPGGSVLYIYDELYKQDKFQHILVRHEQAAVHAADAYARSTGKVGVCLVTSGPGVTNAVTGIATAYMDSIPMVVISGQVPTAAIGQDAFQECDTVGITRPCVKHNFLVKDVRDLAATVKKAFYIARTGRPGPVLIDIPKDVSKAPCQYEPLKSVSLRSYNPVTKGHSGQIRKAVALLLSAKRPYIYTGGGIILADASRELNQFADLLGYPVTNTLMGLGGYRASDKKFLGMLGMHGTYEANMAMQHCDVLIAIGARFDDRVIGDPAHFASRPRKIIHIDIDPSSISKRVKVDIPIVGDVKEVLKELIEQLQTAEHGPDTAALADWWKDIEAWRAKDCLKFDRKSDIIKPQYVVEKAWELTDGNAFVCSDVGQHQMWAAQFYRFNKPRRWINSGGLGTMGFGLPAAMGVKMAHPDDDVLCITGEGSIQMCIQELSTCKQYETPVKIISLNNRYLGMVRQWQQIEYSKRYSHSYMDALPDFVKLAEAYGHVGMRIERTADVEPALKEALRLKDRTVFLDFQTDPTENVWPMVQAGKGITEMLMGSEDL

SEQ ID NO: 35864 - protein, 526 aa, Burkholderia xenovorans LB400
MNLRAFFSTFQRDLLAGTVVFLVALPLCLGIANASGVEPFAGLVSGIVGGLVVAVLSGSRLSVSGPAAGLVVIVIDGIAQLGSFSAFLLAVLLSGAIQFGFGMLKAGRFAAYVPSPVIKGMLAAIGVLLIVKQFPLALGLSGADAASAAQPVAQAAGSIGTPFGSVSLAACVITLLSLAILVGWETRALRRFALVRRVPAPLAVVLLGIGATLLLSVLAPSLAPPAEHRVALPPLESFAALQLALEWADFGPHFAQLVNPDVWRVAITLAIVASLETLLSLEAVEQIDPERRPAPPDRELKAQGVGNLIAGAIGGLPITSVIVRSSANVHAGAQSRLSAIIHGVLLLVSVFALTSVINLIPLACLAAILIFTGLKLAKPSLFAAVAKQGFAPFAPFIVTLVGVLATDLLIGIVLGILCSVLLALYANLRSPIVLAQHGDHYLLSFRKDVSFLGKVPLKHYLQQIPDGATVIVDATRADFVDHDVRELLDTFVADAPNRGIAVEVRHQVRAQARAARGWSMRRTATE

SEQ ID NO: 35865 - protein, 390 aa, Burkholderia xenovorans LB400
MNAPHDTPTSPTFPSRLPNVGTTIFTVMSALAAEKGAVNLGQGFPDFNCDPRIVDAVANAMREGHNQYPPMAGAAPLRQAISDKIANLYGRRYDATTEITVTAGATQALLTAILCSVHPGDEVVVVEPTYDSYLPSIELAGGKPVFVTLEAPDYAIPFDRLAAAITPKTRLLLINTPHNPTGTVWREQDMRKLEEIVRGTNVLILSDEVYEHMVYDGAPHESVARYPELAQRSFVVSSFGKTYHVTGWKVGYVAAPAALTVEFRKVHQFNVFTVNTPMQIGLADYMKDPAPYLDLPAFYQKKRDFFRAGLANSRFRLLPCTGTYFQCVDYSAISDLPEAEFAQWLTGEIGVAAIPVSAFYHEAHESGVVRFCFAKQESTLATALERLARL

SEQ ID NO: 35866 - protein, 395 aa, Burkholderia xenovorans LB400
MESLKTGTDTLFLLLGAGMVLAMHAGFAFLELGTVRKKNQVNALVKILVDFSVSTIAYFFIGYAIAYGVQFFGSAESLAAHNGYALVRFFFLLTFAAAIPAIVSGGIAERSKFNPQLFATFVLVGFIYPFFEGIAWNGRFGIQNWLAEMFGAQFHDFAGSVVVHAFGGWVALPAVLLLGARHGRYHRDGGIAAHPPSNIPFLALGAWVLAVGWFGFNVMSAQTVDKISGLVAVNSLMAMVGGTLTAWLAGRNDPGFSYNGPLAGLVAVCAGSDIMHPLGALVTGGIAGVLFVYMFTCVQNRWRIDDVLGVWPLHGLCGAWGGLAAGIFGLRALGGMGGVSFGAQLVGTLGGIVVATLGGTLVYGAIRLTVGLRLDQEDEYNGADLSIHKISATPE

SEQ ID NO: 35867 - protein, 331 aa, Burkholderia xenovorans LB400
MKSGHVLILSEPSSVRLFREIEEALKQHVSRVTHLQHDDEIDPAGELWRSADVLLAYGGFSCTRELMSAAPSLRAIVSPWTGTEGFDEAAATELGIVVANGQAEENTFSMAEATVMLMLACLYSLHETEDVLRKNQARPPYPIARMLRGRRVGLVGFGGIGRQVARLLGPWGVEMVAYNRSAFTDANVSAVGLPTLLSTSDIISLHIGLSPATRHLLNAENLKLVRPGTILVNTARGGVIDKAALYECARDGRFAKIALDVYEQEPLSELSPLRNLPNAILTPHMVGQTQEARAALIALAVQNVTRVMEGEPPVCFRNPEVIANWRVRRKI

SEQ ID NO: 35868 - protein, 67 aa, Burkholderia xenovorans LB400
MDTGTVKWFNDSKGFGFITPDAGGDDLFAHFSEIRGDGFKTLAENQKVSYETKRGPKGMQAANISPQ

SEQ ID NO: 35869 - protein, 591 aa, Burkholderia xenovorans LB400
MAKMRAVDAAVLVLEKEGIDTAFGVPGAAINPFYSAMRKAGNISHVLARHVEGASHMAEGYTRAQPGNIGVCIGTSGPAGTDMITGLYSAQADSIPILAITGQAPRARLYKEDFQAVDIESIAKPVTKWAVTVREPALVPRVFQQAFHLMRSGRPGPVLVDLPIDVQLAEIEFDIDTYEPLPVYKPKATRKQIEAALTLLNDSDKPLIVSGGGVLNAAAEDLLVTFAETVGVPVIPTLMSWGAIADDHPLMAGMVGLQTSHRYGNATMLAADFVLGIGNRWANRHTGSVEVYTKGRKFVHVDIEPTQIGRVFGPDLGIVSDAKAALELFVEVAKEWKAAGRLKDRGAWVADCQERKRTMHRKTHFDNVPMKPQRVYEEMNQVFGRDTCYVSTIGLSQIAGAQFLHVYKARNWINCGQAGPLGWTIPAALGVRAADPQRPIVALSGDYDFQFMIEELAAGAQFKLPYVHVVVNNSYLGLIRQAQRAFDMDFCVQLGFENINSPETNGYGVDHVAVAEGLGCKAIRVFKPEELKPALQRAQAMLSEFNVPVIVEVILERVTNISMGAEIDAINEFEELAATREDAPTAISMLD

SEQ ID NO: 35870 - protein, 274 aa, Burkholderia xenovorans LB400
MSKRSWWVVLMMFALGFSWLSAGAHADELQMAKARGKLIVGIRNDYVPFGYLDNKGHEVGFEVDLAKFIAKDMFGSDTAIEFVPVVASNRIELLNAGRIDVIFATLGKNPDRAKVIDFTDPYYMMAGMVLLAPKNTTITKWEDLKGRKICGSQGNMYNRTLQEKLGADTVLFTGTAQMYKAFEDNRCEAIAYDGPNLTLKANEPGWKDKDKIALDAFEFVPIVGGVRKNEPAFLNALNQSIKKAEAAGVLVNAEKRYNMGTSKFVTEQQAAASK

SEQ ID NO: 35871 - protein, 416 aa, Burkholderia xenovorans LB400
MPAVKPILKSNKLLNVCYDIRGPVLEHAKRLEEEGHRIIKLNIGNLAPFGFDAPDEIIQDMILNLPGSSGYSDSKGVFAARKAIMHYTQQKGVHGVELDDIYIGNGASELIVMALQGLLNDGDEVLLPAPDYPLWTAGVSLSGGTPVHYICDESNSWMPDLDDIRAKITPNTRALVVINPNNPTGALYSDELLLGLIEIARQHGLVIFADEVYDKIVYDGKKHTSMAALSEDVLTVTFNSLSKSYRSCGYRAGWMFISGLTAGENRRHAKDYFEGLGILASMRLCPNVPGQYAIQTALGGYQSINDLIVPSGRLYKQRELAYDMLTAIPGVSCVKPEAALYMFPRLDPKIYPIQDDQQFILDLLLEERVLLVQGTGFNWPTPDHFRVVFLPNVDDLADSINRIARFLDGYRKRHTA

SEQ ID NO: 35872 - protein, 865 aa, Burkholderia xenovorans LB400
MRIDKLTTKFQEALADAQSLAVGHDNQYIEPVHVLSALVAQQDGSARSLLSRAGVHVQALQTALGDAITRLPQVQGTDGNVQIGRDLTGLLNQADKEAQKLNDTFIASEMFLLAVADDKGEAGRLARQHGLSRKSLESAIAAVRGGSQVHSQDAESQREALKKYTVDLTERARAGKLDPVIGRDDEIRRSIQILQRRTKNNPVLIGEPGVGKTAIVEGLAQRIVNGEVPETLKGKRVLSLDMAALLAGAKYRGEFEERLKAVLNDIAKDEGQTIVFIDEIHTMVGAGKAEGAMDAGNMLKPALSRGELHCVGATTLDEYRKYIEKDAALERRFQKVLVDEPTVEATIAILRGLQEKYELHHGVDITDPAIVAAAELSHRYITDRFLPDKAIDLIDEAASKIKMEIDSKPEEMDRLDRRLIQLKIEREAVKKEKDEASQKRLQLIEEEIERLNREYSDLDEIWTAEKAAVQGSAQLKEEIEKTRAEITRLQREGKLEKVAELQYGKLPGLEAQLKEVTKAEASEQNNPTRPRLLRTQVGAEEIAEVVSRATGIPVSRMMQGEREKLLQIEEKLHARVVGQDEAISAVADAIRRSRAGLSDPNRPYGSFLFLGPTGVGKTELCKALASFLFDSEDHLIRIDMSEFMEKHSVARLIGAPPGYVGYEEGGYLTEAVRRKPYSVILLDEIEKAHPDVFNVLLQVLDDGRMTDGQGRTVDFKNTVIVMTSNLGSQVIQAMVGEPQEAVKDAVWEEVKLHFRPEFLNRIDDVVVFHALDRSNIQSIARIQLQRLQERLAKLDMQLLVSDEALEHVGKVGYDPLFGARPLKRAIQQEIENPVAKLILAGKFGPKDVIPVEVEDGKLVFERVVH

SEQ ID NO: 35873 - protein, 393 aa, Burkholderia xenovorans LB400
MTDVVIVSAARTAVGKFGGSLAKIAAPDLGAAVIRAVLERAGLKPEQVSEVILGQVLTAGSGQNPARQSLIKAGLPSAVPGMTINKVCGSGLKAVMLAANAIIAGDADIVIAGGQENMSAAPHVLPGSRDGFRMGDAKLVDSMIVDGLWDVYNQYHMGVTAENVAKEYGITREQQDAFAALSQNKAEAAQKSGRFDDEIVPIEIPQRKGEPLRFATDEFVRHGVTAESLAGLKPAFSKEGTVTAANASGLNDGAAAVLVMSAKKAEALGLTPLARIKAYANAGVDPKVMGMGPVPASRRCLERAGWTPADLDLMEINEAFAAQALAVHQQMGWDTSKVNVNGGAIAIGHPIGASGCRILVTLLHEMQKRDAKKGLASLCIGGGMGVALAVERA

SEQ ID NO: 35874 - protein, 394 aa, Burkholderia xenovorans LB400
MQRDVVVVSGVRTAIGTFGGSLKDIPPTDLGARVVREALARASVSGDEVGHVVFGNVVHTEPKDMYLARVAAINGGVAQHVPALTVNRLCGSGLQAIVSAAQSVLLGDADIAIGGGAENMSRAPYSMPAARFGQRMGDARLVDMMVGALNDPFQSIHMGVTAENVARKYDISRETQDALALESHRRAANAITSGYFNEQILPITIPSKKGDIVFDTDEHARMSASAEDFSRLKPVFAKENGTVTAGNASGINDAAAAVVLMERGIAEQRGIKPLARLVSYAHAGVDPAYMGIGPVPATRKALERAGLTIADLDVIEANEAFAAQACAVSKELGFDPAKVNPNGSGISLGHPIGATGALITVKALYELQRVGGRYALVTMCIGGGQGIAAIFERI

SEQ ID NO: 35875 - protein, 392 aa, Burkholderia xenovorans LB400
MTDAVIVSTARTGLAKSWRGGFNMTHGATLGGHVTQAAVERAKLDPARVEDVIMGCANPEGATGMNIARQIALRAGLPVSVPGMTVNRFCSSGLQTIALAAQRVIAGEGDVYVAGGVESISCVQNEMNHHMLTEGWLSENKPEIYWSMLQTAENVAKRYSISKERQDEYGVRSQQRAAAALEAGRFKDEIVPLTVLAGVTDKAGGRLFTKEVTVSGDEGIRADTTLEGVSKIRTALPGGVITAGNASQFSDGASACVVMNAKVAEREGLQPLGIFRGFAVAGCEPDEMGIGPVFAVPKLLRQAGLKVEDIDLWELNEAFAVQVLYCADKLGIPQDRLNVNGGAIAVGHPYGVSGARLTGHALIEGKRRGAKLVVVTMCIGGGQGAAGLFEVV

SEQ ID NO: 35876 - protein, 470 aa, Burkholderia xenovorans LB400
MGRLIVVSNRVATPTETKGSAGGLAVGVFGALKDAGGVWFGWSGDVVSETVANAGPTLEQDGAVTFATVGLTRKDYDQYYRGFSNATLWPVFHYRNDLARYEREEYTGYRRVNAWLAHKLIKLLEPDDVIWIHDYHLIPFAEALRNEGVTNRIGFFLHIPFPAPQILLNIPPHEELVKSLSCYDLLGFQTATDELAFKDYVTRHARGTVSADGLVEAFGRKLRTGVYRIGVFPDEIAEQAKRYESRQHVLDLKQSLEGRKLIMSVDRLDYSKGLVERFRAFEHLLERSPEWRGNVTLVQIAPPTRSDVATYQKIRQDLEYEAGRINGRYSGLDYTPIRYLNQQYDRWKLMSLFRESQIGFVTPLHDGMNLVAKEYVAAQNPDDPGVLVLSIFAGAAAELSGALLVNPHDAIGMCEALQRALQMPLDARQRRHEINMAALRKNDLGVWRDTFLHDLRSVPVQQPGKGGGHN

SEQ ID NO: 35877 - protein, 325 aa, Burkholderia xenovorans LB400
MERTTFNVRVDSVRDEAHGVRSFSVSRLDGQPFDHYEPGAHIDVTGPSGVTRQYSLCGDPDHRETHLFAVKREDASRGGSRSLHDEVTVGSQLTIGAPRNLFQLAPGAEEHVLIAAGIGVTPLLSMAYRLLKQRQPFVLHYFARSAEHAAFLPLLSRAPFSEYVKLHFGVERDRLDAVLGDCLADARDGTHIYTCGPSAFMERVVAIGETRVQPQAIHLERFAAEPASTTSAESATLDTFDVRIASSGATVRVDRNTTIVAALASIGIEVDTSCGEGVCGTCMVDVVSGTPEHRDHCLSKAERASGKVICCCISRAASPVLVLDL

SEQ ID NO: 35878 - protein, 67 aa, Burkholderia xenovorans LB400
MPTGTVKWFNDAKGFGFITPDDGGEDLFAHFSEIRSEGFKSLQENQKVSFEIKQGPKGKQAADIKPV

SEQ ID NO: 35879 - protein, 321 aa, Burkholderia xenovorans LB400
MKKIVAWKSLPEDVLAYLQQHAQVVQVDAAQHDAFVAALKDADGGIGSSVKITPAMLEGATRLKALSTISVGFDQFDVADLTRRGIVLAHTPDVLTESTADTVFSLILASARRVVELADWVKAGHWQHGIGPAQFGVDVQGKTLGIVGLGRIGGAVARRAALGFNMKVLYTNRSANPQAEAAYGARRVELAELLATADFVCLQVPLTPETKYLIGAAELRSMKKSAILINASRGATVDEAALIEALQNGTIHGAGLDVFETEPLPADSPLLKLANVVALPHIGSATHETRYAMACNAAENLVAALNGTLAVNIVNREVLAG

SEQ ID NO: 35880 - protein, 537 aa, Burkholderia xenovorans LB400
MTSSNTPSSPLNAIADQALGLADAPAQAAAIAAAPEAVVAEAAAPTGPSFASLGLSADVVSALTAAGYQNPTPVQQRAIPAGIAGRDLMVSSPTGSGKTAAFMLPAIERFSQLQKTQAGQPREPRPADGARTRRPQPVARPTMLVLTPTRELAMQVTTAAATYGKHLKRLRTVSILGGVAYGQQLMLLAKNPEILVATPGRLIDHLERGRIDLSQLQILVLDEADRMLDMGFIEDIETIVAATPATRQTMLFSATLDGKITSLTGRLLKDPERIEIVQRMEQRTNIAQTVHYVDDRDHKDRLLDHLLRDSGLDQAIVFTATKIDADQLAGRLADAGFESAALHGDLPQGARNRTIRALRERRVRVLVATDVAARGIDIPGITHVFNYDLPKFAEDYVHRIGRTGRAGRSGIAVSLVHHAEQGALKRIERFVRTPLAVNVVEGFEPRKSAPSGNGRPGFGGRGRPGGGNGGGRRFGSGSGKPAGNGGAARSGTGSNGGGWAGKSAGGGSREGGFGGGSRDGGYGARRSDGPRTARRGS

SEQ ID NO: 35881 - protein, 416 aa, Burkholderia xenovorans LB400
MALIVHKYGGTSMGSVERIKNVARRVAKWHKAGHKMVVVPSAMSGETNRLLGLAKEITAQPSPRELDMIAATGEQVSSGLLAIALQEAGVDAVSYAGWQVPVKTDSAFTKARISEIDGERVLRDLDAGKVVVITGFQGIDPDGNITTLGRGGSDTSAVAVAAALKADECLIYTDVDGVYTTDPRVVEEARRLDRVTFEEMLEMASLGSKVLQIRSVEFAGKYQVKTRVLSSLTDPLIPLDAEMKSGTLITFEEDETMEKAVISGIAFQRDEARIAVMGVPDKPGIAYQILGPVADANIDVDMIIQNQSVDGKTAFTFTVGRGDYQRAMDILTGQVKGHVQAEQVLGDPKVSKVSVVGVGMRSHVGIASTMFRTLSEEGINIQMISTSEIKISVLIDEKYMELAVRALHKAFELDQA

SEQ ID NO: 35882 - protein, 407 aa, Burkholderia xenovorans LB400
MNNDTLHLPIYMDYSATTPIDPRVVDKMIPYLREQFGNPASRSHSYGWDAERAVEEARENVAALVNADPREIIWTSGATESDNLALKGAAHFYKSKGKHIVTVKTEHKAVLDTCRELEREGFEVTYLDVRDDGLLDLDKFKAALRPDTILVSVMSVNNEIGVIQDIEAIGEITREKGIVFHVDAAQATGKIAIDLQKLKVDLMSFSAHKTYGPKGIGALYVRRKPRIRIEAQMHGGGHERGMRSGTLATHQIVGMGEAFRIAREEMATENERIRMLRDRLLRGLSEMEEVYVNGDMEKRVPHNLNISFNFVEGESLIMAVKDVAVSSGSACTSASLEPSYVLRALGRNDELAHSSIRFTVGRFTTEQDVDYVINLLKTKISKLRDLSPLWEMHKDGIDISTIQWAAH

SEQ ID NO: 35883 - protein, 413 aa, Burkholderia xenovorans LB400
MNGPVSIEVLRQHLIDPEICIRCNTCEETCPVDAITHDDNNYVVKADICNGCMACVPPCPTGAIDNWRTVLKADAYPIDEQFTWDVLPEQNTMAVAAADELSGAGASGDTPADASGIEVDTVRGSVVPPWSAAKPYVNLYTHKAPTTATVVGNYRLTDGSTDSDIHHIVLDFGAMPFPVLEGQSIGILPPGSTADGRAHHARQYSIASPRDGERPGYNNISLTVKRVSQQHGDSTDGVCSNYLCDLKKGDVVNVIGPFGGTFLMPNHPNSHLLMICTGTGSAPMRAMTEYRRRRRLKGATGKLMLFFGARTKEELPYFGPLTNLPKDFIDTNLAFSRTPGQPKRYVQDAMRERAVDVAHMLRDENTHIYVCGLKGMEDGVLQALKEIGEQHQLDWDGLWARLKREGRLHLETY

SEQ ID NO: 35884 - protein, 569 aa, Burkholderia xenovorans LB400
MNTERNDAPAASNFIRNIIDEDNRTGKWGQRVETRFPPEPNGYLHIGHAKSICLNFGVARSYGGVCHLRFDDTNPEKESVEYVDSIIDAVRWLGFEWEKDGKEQLYYASDYYDKLYEFAELLIQRGKAYVDSQSAEEMRANRGSATEVGTPSPFRERSVQENLDLFRRMKAGEFKEGEHVLRAKIDMSSPNFNMRDPVIYRIRFAHHYRTGDKWCVYPMYDYTHCISDALENITHSLCTLEFEDHRPLYDWILNELAEAGIFTRPLPQQIEFSRLNLTYAITSKRKLLQLVTEGHVDGWDDPRMPTIVGVRRRGFTPESIQLFCERIGITKVDSWIDMSVFEGALRDDLDEKAPRTAAVLDPVKLIIDNFPEGVTEPCNAPVHPHHPEMGVREFPISRELWIERDDYNETPPKGYFRLFPGNKVRLRYGYVIECIGADKDENGNIVAVHCNYFPDSKSGTEGANNYKVKGNIHWVSAAAACPAEVRIYDRLFKEPQPDAGGRDFLEALNPDSKRVVNAYLEPGAREALPEQRYQFERHGYFVADRVDSKPGKPVFNRIVSLRDSWGKPA

SEQ ID NO: 35885 - protein, 629 aa, Burkholderia xenovorans LB400
MNNNMFSKAAVWLVIALVLFTVFKQFDKPRVQEGVSYSQFMDDAKNGKVKNVIVQGRNLTVTPADGQKYQIVSPGDIWMVGDLMKYGVQVSGKADDEPNALVSALYYLGPTILIIGFWFYMMRQMQGGGKGGAFSFGKSRARLIDENNNAINFTDVAGCDEAKEEVSELVDFLRDPQKFQKLGGRIPRGVLLVGPPGTGKTLLARAIAGEAKVPFFSISGSDFVEMFVGVGAARVRDMFEQAKKHAPCIVFIDEIDAVGRHRGAGMGGGNDEREQTLNQMLVEMDGFEANSGVIVIAATNRSDVLDKALLRPGRFDRQVYVGLPDIRGREHIMKVHLRKVPISNDVDAAVIARGTPGFSGADLANLVNEAALFAARRGKRIVEMTDFEDAKDKIFMGPERKSAVIREESKRATAYHESGHAVIAKLLPKADPVHKVTIIPRGRALGVTWQLPEHDNETYSKDYLLDRLAILFGGRVAEELFLNLISTGASDDFNKATQTARAMVARFGMTDALGPMVYVDDENDATPFGRGFTRTISEATQQKVDAEIRRVLDEQYNLAKRLLDENRDKVEAMTAALMEWETIDADQINDIMAGRPPRSPKSSTPSATDASSGGSPGTEVKPGSATAPA

SEQ ID NO: 35886 - protein, 486 aa, Burkholderia xenovorans LB400
MGRLIIVSNRVAPISEGGPAAGGLAVGVYDALKETGGMWFGWSGDVLSSGQPQIKVEERGPVTFATIALMRRDYDQYYRGFSNATLWPAFHYRADLLQYDRHDFEGYWRVNAWLAQQLVPLLREDDVIWVHDYHLIPFAQALRAAGVKNRIGFFLHIPFPASQVLLAVPPHRELVEALCSFDLLGFQTAPDLRAFCDYIVNEANGTADPSASGPLTIHAFGRTLRAAAYPIGVYPDEIAELAKAGERGKPVRTMKATLHSRKLIMSVDRLDYSKGLVERFRAFERLLEHSTAQRNKVSFLQIAPPTRADMHAYQDIRLQLEGESGRINGRFAELDWTPILYIHKQYERSVLAALFRTAHVGYVTPLRDGMNLVAKEYVSAQDPENPGVLVLSRFAGAAQELDGALIVNPVDIDGMAEALARALDMPLAERQARHRDMMVQLRENNVSVWRDNFMRDLQGVAGAKGTRNGKARAVAGKKAARETQAG

SEQ ID NO: 35887 - protein, 325 aa, Burkholderia xenovorans LB400
MNTAFLPDPASLRVRVVRKEALTKDIVLIELASVDGQPLPTFTAGAHIDVQLPGGLTRQYSLCDTAAETYQIAVLKEPQGRGGSVAMHDLVHAGSELVVGTPRNLFELSASAQSSLLLAGGIGITPLLCMAQSLATARRPFSLHYCTRSAEATAFRGALAAAPYAAQVHHHYDDGTPEQKLDLPALLSCPQPGMHLYTCGPSGFMDAVLAAARASGWPESQLHYEFFKAEPPQSENDGSFEVQVASTGEVIPVAADETVLMALAAHGIELPASCEQGVCGTCLTRVLGGEPDHRDMYLTPEEQAQNDQFLPCCSRSKSARLVLDI

SEQ ID NO: 35888 - protein, 299 aa, Burkholderia xenovorans LB400
MNAPTPTGFRCGMVAIVGRPNVGKSTLMNALVGQKVSITSRKAQTTRHRITGIHTLEDAQYIFVDTPGFQTKHSGALNRSLNRAVTSTLTSVDAILFVIEAGRFGPDDQKVLDLIPPSVPTLLIANKLDRVSDKDSLFPFMQQVSALHKFAEIVPLSAKHPDDIKRLMATVKPFLPEGAPIYGEDDLTDRSERFLAAEILREKVFRWTGDELPYTSTVLIDKFETEGRLRRIFATIMVDRDTHKAMIIGQKGAKLKQISTEARLDMEKLFDGPVYLETFIKVKSGWADNEAGLRAYGYE

SEQ ID NO: 35889 - protein, 329 aa, Burkholderia xenovorans LB400
MQKILVARPIFPDVIERLKQYFDVDWNQGDVLSADELTRRLADKDGALTAGEPIGAAVLAAAPRLRVVSNMAVGYNNFDMTAFNAANVLGTNTPDVLNESTADFGWALMMAAARRIAESEHWLRAGKWQKWTYDGFLGSDLYGSTLGVIGMGRIGQALARRAKGFNMQVIYHNRSRVAPEIEAELNAGYVSKQDLLRRADHVVLVLPYTKENHHTIGAAELALMKPSATLTNIARGGIVDDAALVEALRSKQIAAAGLDVFEGEPNLNRDLLSVPNVVLTPHIASATEATRRAMANLAADNLIAGLGEGPRAGRPPNPVNPGVIGKARS

SEQ ID NO: 35890 - protein, 238 aa, Burkholderia xenovorans LB400
MIRPVFEPETLPVEATGADLPPVAGDRLTPDGLRARFEQPLAWTPEPFVEAPWRDTHADPRVAAVLVPLVIRERGLTVLLTQRADHLNDHAGQVSFPGGRHEPFDADATATALREAQEEVGLAPSRVEILGALPDYLTGTGFRVTPVIGLVHPPFTVKADALEVAEVFEVPLAFLMNPAHHEERVFRYEGGERRFFAMPYPRGTSAEAGQSGSELGGHYFIWGATAAMLRNFYRFLAA

SEQ ID NO: 35891 - protein, 67 aa, Burkholderia xenovorans LB400
METGIVKWFNDAKGFGFITSDSGGEDLFAHFSEIRADGFKSLKENQRVSFDVKAGPKGKQAANIQPL

SEQ ID NO: 35892 - protein, 398 aa, Burkholderia xenovorans LB400
MNSVTEPLVRLAARVDAIQPFYVMELAKEAALLERDGRDIIHMGIGEPDFTAPEPVIEAAASALRRGVTQYTNALGLHALREAISAHYADFYGVSVDPARIVVTAGASAALLLACAALVDRDDEVLMPDPCYPCNRHFVIAAEGKPVMVPSGPAERFQLTAADVERLWNERTRGVLLASPSNPTGTSIEPAELERIVKAVRARGGFTIVDEIYQGLSYDAKPISALSFGDDVITVNSFSKYFNMTGWRLGWLVVPPGMVSAFEKLAQNLFICASALAQHAALACFEPDTIAIYEARRLEFKRRRDFIAPALQSLGFSVPLMPDGAFYVYADCRTVAHPAAGDSAALTRAMLHDAGVVLVPGMDFGTHAPKDYIRLSYATAYPKLEEAVGRLAKLFGKD

SEQ ID NO: 35893 - protein, 461 aa, Burkholderia xenovorans LB400
MNSAQQQDGLKRGLKNRHIQLIALGGAIGTGLFLGSASVLQAAGPSMILGYAIGGVIAFMIMRQLGEMVAQEPVAGSFSHFAYKYWGDFPGFLSGWNYWVLYVLVSMAELTAVGTYVHYWWPGVPTWVSALVCFAAINAINLANVKAYGETEFWFAIIKVAAVIGMIVFGGYLLISGHGGPQASISNLWAHGGFFPHGFHGLFMMLAVIMFSFGGLELIGITAAEADEPQKSIPKAVNQVIYRILIFYICSLTVLLSLYPWNEVAAGGSPFVMIFSQIGSTLTANVLNVVVLTAALSVYNSGVYANSRMLYGLAEQGNAPRALMKVDRRGVPYMAIGLSALATFTCVIVNYLIPAEALGLLMALVVAALVLNWALISITHLKSRKAMVAAGETLVFKSFWFPVSNWICLAFMALILVILAMTPGLSVSVWLVPAWLVVMWAGYVFKRRRAAVQGGARVVGR

SEQ ID NO: 35894 - protein, 343 aa, Burkholderia xenovorans LB400
MAFNVTLRQSGRQFQVEQDEPVLSAALRQGIGLPYGCKNGACGSCKGTVISGEIEQRAHSSSALSNEEKTRGMALFCCATACTDLEVDIREVAGVGDVQVKKLPCRVNAIERKADDVIVLKLQLPANERLQYLAGQYLEFILKDGKRRSYSMANAPHTEGPIELHIRHMPGGAFTDHVFNTMKERDILRFEAPLGTFFLREDSDKPIVLLASGTGFAPLKAIIEHAVFKNLNRPMTLYWGARRKKDLYLLELAEQWAREIPNFKFVPVLSEPDAGDAWTGRVGFVHRAVIEDLPDLSAYQVYACGAPVMVESAQRDFTQHHGLPEDEFYADSFTSAADLANAV

SEQ ID NO: 35895 - protein, 68 aa, Burkholderia xenovorans LB400
MATGTVKWFNDAKGFGFITPDEGGEDLFAHFSAIQMNGFKTLKEGQKVTFEVVQGPKGKQASNIQAPA

SEQ ID NO: 35896 - protein, 408 aa, Burkholderia xenovorans LB400
MSDIKKVVLAYSGGLDTSVILKWLQDNYDAEVVTFTADIGQGEELEPARKKALQLGIKPENIFIEDLREEFVRDFVFPMFRANTIYEGEYLLGTSIARPLIAKRQIEIARATGAQAVSHGATGKGNDQVRFELGYYALEPGIKVIAPWREWDLLSREKLLAYAEKAGIPIEMKHKQGGAPYSMDANLLHISFEGRHLEDPKAEAEADMWRWTVSPEEAPDQAEYLDIEYEHGDPVAINGKRLSPAEMLTELNRLGGKHGIGRLDLVENRYVGMKSRGCYETPGGTIMLKAHRGIESITLDREVAHLKDDLMPRYAALIYNGYWWSPERRALQVLIDHTQEKVNGWVRVKLYKGSVSVVARDSKETLFDKTIATFDDDGGAYNQADAGGFIKLNALRMRIAENARRQRG

SEQ ID NO: 35897 - protein, 543 aa, Burkholderia xenovorans LB400
MPHSCLPGPICAVRKTALQRAFMSFDSLGLSEPLVRAVHELGYTTPTPIQTQAIPAVLNGGDLLAGAQTGTGKTAGFTLPILQRLNSSPAVANGSGKRAVRALILTPTRELAAQVEESVRAYGKYLKLKSTVMFGGVGINPQIGALRSGVDIVVATPGRLLDHMQQKTIDLSHLEILVLDEADRMLDMGFIHDIKRVLAKLPPKRQNLLFSATFSDEIKTLADNLLDSPALIEVARRNTTAETVAQKIHPVDRDKKRELLTHLIKQHNWFQVLVFTRTKHGANRLAEQLTKDGISALAIHGNKSQSARTRALAEFKDGTLQVLVATDIAARGIDIDQLPHVVNYDLPNVPEDYVHRIGRTGRAGATGEAVSLVCVDELQLLKDIEKLIKRPVPQEVVAGFEPDPTAKPEPILRRGQGGGGGGGGRSPRQGQGAPKRDDARRDGAGSAKPAQRSGQRPANGQQQPKPQGAKPAGNGGQPRRDGQRHDDRPRAVAHEGSAAQHAPRKPQAAKPQGGNPGALLGGTKPRNDAPRGGQPTRSGQRGR

SEQ ID NO: 35898 - protein, 779 aa, Burkholderia xenovorans LB400
MPSNVYSNLPFEARLMSTPVNSKLREAALDYHEFPTPGKIAIAPTKQMINQRDLALAYSPGVAFACEEIVENPLNAARFTARSNLVGVVTNGTAVLGLGNIGPLASKPVMEGKAVLFKKFAGIDVFDIELNESDPHKLVDVIAALEPTFGGINLEDIKAPDCFIVERECRKRMKIPVFHDDQHGTAIVVAAAITNGLKVVGKDIREVKLVSSGAGAAALACLDLLVDIGLPLENITVTDLAGVVYKGRVELMDPDKERFARETDARTLAEAIGGADVFLGLSAGGVLKQDMVKQMADKPLILALANPTPEILPELALEVRPDAVLCTGRTDYPNQVNNVLVFPFLFRGALDAGATTVTREMEIAAVNAIAELARQEQSDIVATAYGIQDLSFGPEYLIPKPFDPRLIVKVAPAVAQAAMDSGVAERPIEDMDAYEQHLQQFVYHSGTTMKPIFQLARSVEPEKKRIVFAEGEEERVLRAMQIIVDEKLAKPILIGRPAVIEQRIARYGLRLVAGQDYTVVNTDHDERYRDFWQEYHRMMSRKGISAQMAKLEMRRRTTLIGAMLVEKGEADGMICGTVSTTHRHLHFIDQVIGRKAGAKVYAAMNALVLPNRQIFLVDTHVNVDPTPEQLAEITIMAAEEVRRFGIEPKVALLSHSNFGTSNAPTAQKMRDTLAILRERAPDLQVDGEMHGDIALDANLRREVMPDSTLEGDANLLVLPNIDAANISYNLLKTAAGNNIAIGPILLGAARPVHVLTASATVRRIVNMTALLVADVIAAR

SEQ ID NO: 35899 - protein, 373 aa, Burkholderia xenovorans LB400
MKFIDEARIEVIAGDGGDGSASMRREKFVPFGGPDGGDGGRGGSVIAVADRNINTLIDYRYAKKHLARNGENGRGADCYGKGGDDITLRMPVGTTITDMETGELIADLTEHNQSVQIAQGGAGGLGNLHFKSSTNRAPRQKTDGKPGERRMVRLELKVLADVGLLGMPNAGKSTFISSVSNARPKIADYPFTTLAPNLGVVRVGPSRSFVIADIPGLIEGAAEGAGLGHQFLRHLQRTGLLLHIVDLAPFDESVDPVAEAKAIVNELRKYDELLYEKPRWLVLNKLDMVPEDEREARVSAFIEGFGWDGPVFEISALTGQGCENLCYAVFDYIAAHSDAQRAAEAEDLAADVRFRAKPADPVAADDSGVDPQQ

SEQ ID NO: 35900 - protein, 103 aa, Burkholderia xenovorans LB400
MYAVIKTGGKQYKVAVGEKLKVEQIPADIDAEITLDQVLAVGEGESIKFGTPLVSGASVKATVVSQGRHAKVTIFKMRRRKHYQKHGGHRQNYTELRIDAINA

SEQ ID NO: 35901 - protein, 400 aa, Burkholderia xenovorans LB400
MNDAFICDAIRTPIGRYGGALKDVRADDLGAVPIRALIDRNPGVDWRALDDVIYGCANQAGEDNRNVARMSALLAGLPTEAPGATINRLCGSGMDAVGTAARAIKAGEARLMIAGGVESMTRAPFVMGKATGAFSRQAEIYDTTIGWRFINPLMKRQYGVDSMPETAENVAVEFSVSRADQDMFALASQQKAARAQQDGTLAQEIVGVEIAQKKGDPVRVLLDEHPRETSLESLGKLKGVVRPDGSVTAGNASGVNDGACALLLANQQAADQYGLRRRARVVGMATAGVGPRIMGIGPAPATQKLLKQLGMTLEQFDVIELNEAFASQGLAVLRTLGLRDDDPRVNPNGGAIALGHPLGASGARLITTALYQLERINGRFALCTMCIGVGQGIALVIERL

SEQ ID NO: 35902 - protein, 103 aa, Burkholderia xenovorans LB400
MDTQQRIKQIVDDNAVVLFMKGTAQFPMCGFSGRAIQILKACGVGEIKTVNVLEDDEVRQGIKQFSNWPTIPQLYVKGEFIGGSDIMMEMYESGELQQLFAAA

SEQ ID NO: 35903 - protein, 517 aa, Burkholderia xenovorans LB400
MLTGLGSIIGSGWLFGAWKAAKIAGPAAICAWVIGAVVILAIALTYAELGAMFPESGGMVRYARYSHGALVGFISAWANWIAIVSVIPIEAEASIQYMSTWPYPWAHALFVDGSLTTHGLLLSAALVIIYFLLNYWGVKLFARANSAITIFKFLIPGATILGLMLTGFHKENFGEVSTFAPYGWSAVLTAVATSGIVFAFNGFQSPINLAGEARNPARSVPFAVIGSILLALVIYVLLQIAYIGAVNPSDVMKGWSHFNFASPFAELAIALNLNWLAILLYVDAFVSPSGTGTTYMATTSRMIYAMERNNTMPKMFGNVHPFYGVPRPAMWFNLLVSFIFLFFFRGWSSLAAVISVATVISYLTGPISLMSLRRAATDLERPLHIPGMKIIAPFAFVCASLILYWAKWPLTGEIILLMVVALPVYFYFQAKSGFAGWGRDLKAAWWLVAYLPVMAILSLIGSKQFGGHDLIPYGWDMLVVIAFSLVFYYWGVNSGYRSEYLDERQEHDEVLEGIGAH

SEQ ID NO: 35904 - protein, 67 aa, Burkholderia xenovorans LB400
METGTVKWFNDAKGFGFITPDGGGEDLFAHFSEIRTEGFKTLQENQKVTFEVKTGPKGKQAANIKPV

SEQ ID NO: 35905 - protein, 362 aa, Burkholderia xenovorans LB400
MATPQFHPLRIREVRPETADAVSVAFEVPAELREQYRFTQGQFVTLKTHIDGEETRRSYSICVGVTDYDRDGELRIGIKRVRGGRFSNFAFDTLQPGHTIDVMTPDGRFFTHLNADQGQQYLAFSGGSGITPVLAIIKTTLEVEPRSTFTLVYGNRSVDQIMFAEELEDLKNRFMNRFVLYHVLSDDLQDVELFNGVLDQEKCAAFIENLLPADAIDEAFICGPAPMMDAAEAALKAAGVPPEKVHVERFGSPLPQAGVPQIEITEDTPAADLEIVLDGKRRKLRLPYQGVSVLDVGLRAGLALPYACKGGVCCTCRAKVLEGEVKMEKNYTLEEHEIRDGFVLTCQCHPVSDRVVVSYDER

SEQ ID NO: 35906 - protein, 760 aa, Burkholderia xenovorans LB400
MDEQLKQSALAYHQNPKPGKISVTPTKPLSNQLDLSLAYSPGVAAACMAIYDEPLDAQKYTSRGNLVGVITNGTAVLGLGNIGPLAAKPVMEGKGCLFKKFAGIDVFDIELSESDPDKLVEAIAMLEPTLGGINLEDIKAPECFYIEKKLRERMKIPVFHDDQHGTAIIASAAILNGLKVVGKKLGEVKLVCSGAGAAAIACLDLLVNLGLSKKNILVTDSKGVIYEGRGNLDPSKERYAANTGARTLADAIRGADVFLGCSSAGVLKPEMVAEMGTQPLILALANPEPEIRPEDAKKVRPDCIIATGRSDYPNQVNNVLCFPFIFRGALDVGATTITEEMKLACVRAIAELAEETDQGDEVAKAYEGHSLEFGPEYLIPKPFDPRLIIKIAPAVAQAAMDSGVATRPIKDMDAYREELGTTVYRTGMVMRPVFAAAKSEPARIVFAEGEDERVLRAAQFVLLEKIARPILVGRPSVIEMRLKKMGSKLKCGDDFEVVDPEDDPRYQQSWQAYHELGAREGVTPDVAKAAMRKFNTLIGAILVRLGEADGMICGMIGQYHTHLKFIEQVLGKAENVQNFAAMNLLMLPGRNLFICDTYVNETPTAEQLADMTMLAAGEIEKFGITPKVALLSNSNFGSAPSSSSQRMAAARKLIVERAPTLEIDGEMHGDAALSEAVRKAAFPGTTLSGEANLLIMPNVEAANITYNLLKMIGGEGVTVGPFLLGAEKPVHILTPAATVRRIINMTAVASANARKPANAK

SEQ ID NO: 35907 - protein, 289 aa, Burkholderia xenovorans LB400
MDIGFIGLGEMGAAMVANILKAGHQVRVWNRSPERAQPLVEAGARIVATPAEAFAGDAVFSMLADDSALREVITATLLEHAPRGLTHVNMATISVALAEELATAHASRGVHYVAAPVLGRPDVAAAGKLTIVAGGPAESIDRVQPIFDAIGQKTWRIGSLPQQANVMKLAANFMLGAAVETLGEAATLVTGHGLAMQDFLDVITSGLFPGPVYSGYGKLIAEQRYEPALFKARLGLKDIRLALAAADAVTTPLPIASVVRDSLIEAVAHGDGEKDFAVLGQVAARRAGR

SEQ ID NO: 35908 - protein, 174 aa, Burkholderia xenovorans LB400
MSSRRIAVRRSGVHGKGVFAVEPIAAGERLIEYKGERISWKEALRRHPHNPAEPNHTFYFALDSGKVIDGKVNGNSARWINHSCAPNCEAEEIDGHVYVHALRDIAEGEEVFYDYGLVIDARQTNKLKKEYECRCGARKCRGTMLAPPEKEKGAGKSGKSAKKAGTTVKKAKKK

SEQ ID NO: 35909 - protein, 552 aa, Burkholderia xenovorans LB400
MDIKRTVLWVIFFMSAVMLFDNWQRDHGRPSMFFPSATPTRTVGSAAPGTTTPGTQPADLPATNAAAPGNAPAATQSQLIKFNTDVYSGEIDTRGGTLSKLSLVKQGDGKQPDLVITLFDRTANHTYLARTGLLGGDFPNHNDIYTPLPNQPHDLTGDEKSFQISFESPVKGGVKVIKTYTFTRGSYVIGVDTKIQNVGTTPVSPSVYMELVRDDQPVETPRFSHTFIGPAVYTDQHHFQKMTFGDIDKNKQDYATSADNGWIAMVQHYFASAWIPQQGAKRDIYVEKIDPALYRVGVKEPVPTIAPGQTVDVSARLFAGPEEERMLEGIAPGLELVKDYGWVTIIAKPLFWLLEKIHSYVGNWGWSIVLLTLLIKAVFFPLSAASYKSMARMKAITPRMQALRERFKGDPQKMNSALMELYKTEKVNPFGGCLPVVIQIPVFISLYWVLLSSVEMRGAPWILWIHDLSQQDPFFILPVLMAVSMFLQTKLNPTPPDPVQAKMMMFMPIAFSVMFFFFPAGLVLYYVVNNVLSIAQQYYITRMMGQAKTKAA

SEQ ID NO: 35910 - protein, 515 aa, Polaromonas sp. JS666
MKKFLASLVLGLSLLGTGAAVMAQAPAAAPAASAAEAKPAEAAAPAAPAAAAAPAAAAAAPAASAAAAPAPVPNKGDTAWMMVSTLLVIMMTVPGLALFYGGLVRSKNMLSVLMQVMVTFSMIVVLWFIYGYSLAFTEGNAFFGGFDRLFMKGVWDNAAGTFANAATFSKGVVIPEIVFAAFQATFAGITCTLIVGAFAERIKFSAVLLFMAIWFTFSYAPIAHMVWFWMGPDAYTGKEVVDAMTGKAGYIWQMGALDFAGGTVVHINAAVAGLVGAFVIGKRIGYGKESMAPHSLTLTMVGSALLWVGWFGFNAGSALEANGFAALAFINTLGATAAAVLAWCVGESLMRGKASMLGAASGAVAGLVAITPAAGNVGIGGGLVIGLAAGFACLWGVNGLKKLLGADDSLDVFGVHGIGGILGALLTGVFNSPSLGGPGYVADWTTATMVTAADFSVVSQLWIQAKAVLITIVWSGVVSFIAYKIVDLTIGLRVSEEDEREGLDITAHGETAYNR

SEQ ID NO: 35911 - protein, 451 aa, Polaromonas sp. JS666
MSNRFDAYDADRPLMLRCACGQDHAPGEHDAAAASAQELSHSFMEASLVKALFPVDSVRRSFLRAVGANTARAAIASVFPMGALQAMAQDRGPLEKKDLKIGFIAITCASPLIMADPLGFYKKEGLHVQLNKTAGWALIRDKMINKEHDASHFLSPMPLAMTMGLGSNQVNMNVASIQNTNGQAITLHVKHKNNRDPKNWKGFKFAIPFEYSMHNFLLRYYLAENGLNPDTDVQLRVVPPPEMVANLRAGNIDGFLGPDPFNQRAVYDEVGFIHILSKDIWDGHPCCAFGVSDEFIQKNPNTFAALYRAVLGASFMASQPKDRDLIAKVIAPTQYLNQPEAVLQQVLTGKFADGLGNIKNVPDRANFDPVPWQSMAVWMLTQMKRWGYVKGDVNYRQIAEKVFLLTEAKKQMSLAGFKPPEGAYKKFKVMGKEFDPAKPEDYVKSFAINKL

SEQ ID NO: 35912 - protein, 304 aa, Polaromonas sp. JS666
MSSINTKTYEPSSPRKVAFLGLGVMGYPMAGHLALAGHQVTVYNRSPARSTAWCAEFAATARPSSATVPRLAAAGADVVFSCVGNDDDLRSVTLGPDGAFAGMKPGAVMVDHTTASADVARELHAAAQQLGLHFIDAPVSGGQAGAQNGILTVMCGGDAAAFESIKPAGMAFSRAFTLMGDSGAGQLTKMVNQVCIAGLVQGLSEAIAFGQKAGLDMNQVLDVIGKGAAQSWQLDNRGKTMAADQFDFGFAVDWMRKDLGLVLDEARRNGARLPVTALVDQFYADVQAMGGRRWDTSSLIRRLK

SEQ ID NO: 35913 - protein, 277 aa, Polaromonas sp. JS666
MKQIRNMARRTLLVAGSLALGSTLLGLPASASARTLDEIVASKKIVIGVNPTLPPLGIFNDKNEIDGFDVDVARKLGELLGVKTEIVQVGSPDRIPFVSSGKIDAVLGAMTITAERQKVIDFTVPLHTEVLGVLTTKAKPYKDWMELNDTAVRLVEVRGSTPVKLAQEKLPKAQLLLLDNYPDAVRAIAQGRADAMIDVMDFMTEHTAKHKVDWRIVDAPIDVYFCAVGVQKGNDALREKLSGAIKELHRNGYVDERWKKWFGGPMLHDPRTAPTYK

SEQ ID NO: 35914 - protein, 361 aa, Polaromonas sp. JS666
MKFVDEAFIDIAAGDGGSGCVSFSHEKYKEFGGPNGGDGGRGGHVYAVADVNLNTLVDFRFSRRHEARNGQHGMGSDMFGAKGDDIILKMPVGTILTDAETGEVLFELLVPGEQVLIAKGGDGGFGNLRFKSSTNRAPRSKTPGWPGERKNLKLELKVLADVGLLGMPNAGKSTFISAVSNARPRIADYPFTTLHPNLGVVRVGPEQSFVVADLPGLIEGASEGAGLGHLFLRHLQRTRLLLHIVDLAPFDEGVDPVAQAKAIVRELKKYDEALYEKPRWLVLNKLDMVDADKRAAIVKDFVKRFKFKGPVFEISALTREGCEHLIKTIYQHVKQVQKSEQPVEEVDPRFVPLPPESPETP

SEQ ID NO: 35915 - protein, 103 aa, Polaromonas sp. JS666
MYAVIKTGGKQYKVAAGEKIKVEQIAADVGQEIVIDQVLAVGEGSAIKVGTPLVSGATVTVTVLSHGRHDKVRIFKMRRRKHYQKRQGHRQNFTELQIGAIVG

SEQ ID NO: 35916 - protein, 109 aa, Polaromonas sp. JS666
MSTTDTTQQRIDQIVKSSDVVLFMKGTAQFPMCGFSGRAIQVLKACGVNKPVTVNVLEDEEIRHGIKEYSNWPTIPQLYVKGEFIGGSDIMMEMYQNGELQQVLGTPTA

SEQ ID NO: 35917 - protein, 126 aa, Polaromonas sp. JS666
MFRTLLKSKIHRASVTHCELNYEGSCAIDEDLLDAANLGENEQVHIWNINNGERFITYAIRAERGSRIISVNGSAARRAAVGDLVIIAAFAQVHEEYVAGFRPKLVFVDPDNRIKEERSTIPVQMP

SEQ ID NO: 35918 - protein, 319 aa, Polaromonas sp. JS666
MSANEIAVKVARKVREAQDINSYELVSVNGQALPAFEAGAHVDVHLPNGLVRQYSLCGMPHQKDRYRIAVLRDPKSRGGSEAVHDLVHEGDTLRISAPRNLFRLAAGEQTSVLLAGGIGVTPLLAMAYHLHALGSAFALHYFARSRDRVAFLAELQNSGFARNVVLHLDDEAVAGARPLRSLLETLQRDAHIYTCGPTGFLNHVLETASALDWPGGQVHYETFSPPQPTAGDSFEVRISSTGQSVVVAADESVVSAVARLGIEIPVSCEQGICGTCLTRVAEGVPDHHDQYLTNEEHERNDQFTPCCSRARSKVLVLDL

SEQ ID NO: 35919 - protein, 400 aa, Polaromonas sp. JS666
MNQAFICDAIRTPFGRYGGALSSVRADDLGAIPLKALMARNSNVDWQLVSDVIFGCANQAGEDNRNVARMSSLLAGLPLELPGATINRLCGSGLDALGTAARAIKSGEAQLMIAGGVESMSRAPFVMPKAESAFSRANAVYDTTIGWRFVNKLMKEKYGVDAMPETAENVATDYKISREDQDKMALASQLKAVAAQKAGYFDAEITPVTIAQKKGDPIIVNKDEHPRETSMETLARLKGVVRPDGSVTAGNASGVNDGACALLLADEASAAKNGLTPRARIVGMATAGVAPRIMGIGPAPATQKVLALTGLTLAQMDVIELNEAFAAQGLAVLRLLGVRDDDPRVNPNGGAIALGHPLGASGARLATTAVNQLHKGGGRYALCTMCIGVGQGIAVILERV

SEQ ID NO: 35920 - protein, 332 aa, Polaromonas sp. JS666
MNTAAYARPRIVIAGDAEQALRRLGDWRKIDAQADVTAHHLPLRGAALINALKDADAVVLVRDRTPFDAALLARLPTLRYLVFTGTRNTTLDLAALAARDIPVSHTEWGPSKESTCEMTWSLILAATRQLEQQTALLRRGQWRADQPEPLAGVLHGQTLGLIGLGEIGGRVAKVGQALGMKVITWSPRMTPERAAQHGASAVTLEELLGSAQVVSLHLVPTPATHHLLNAQRLKLMQPGSLLVNTSRSALVDGAALVQALEQGRPGFAALDVFDVDPLPMDDPLRRMPNVLLTPHLGFVTEPVYQRFAAGVTECLEAWLNRQPLIRVVPATA

SEQ ID NO: 35921 - protein, 324 aa, Polaromonas sp. JS666
MQTHHPDFMVFTGNANPSMASEIAQHLGISLGAAHVGRFSDGEVTVEIQQNVRARDVFVVQSTCAPTNDNLMELLIMVDALKRASAERIAAVIPYFGYARQDRRPRSARVPITAKVVANMLQAVGVSRVLTMDLHADQIQGFFDIPVDNIYASPVLLGDLRQKNYTDLMVVSPDVGGVVRARALAKQLGCDMAIIDKRRPKANVSEVMHVIGDIEGRNCVIMDDMIDTAGTLVKAAEVLKERGAQKVYAYCTHPIFSGPAISRIAQGDALDEVVITNTIPLSQNAQTCKKIRQLSVAPLIAETIQRIAKGESVMSLFSDQDNLF

SEQ ID NO: 35922 - protein, 782 aa, Polaromonas sp. JS666
MQHNQPVDDSSHTDPALTALRLQLATKENVLATLVVDLDPQLRFAQGLLALTDRRLLARGPQGDWHAWSLPSAAGAREQGLQLRHFDHAGVGTLELHDAHSRLASWRFTLGGNVQALRLVRLFAQQGAVTADVAGAASVADEAALCPECDLPLPPDSEECPACARELHTPPSTWVLLRLWRFAHPYRHQLLAGFLLTLASTAATLVPPYLTIPLMDDILIPFQNGQQIETWKVAAILGGLLGAAVLGWALNWARTYLLALVSERIGADLRTATFDHLLELSLDYFGGKRTGDLMSRIGSETDRICVFLSLHALDFATDVLMILMTAVILFSINPWLALVTLLPLPFIGWMIHVVRDKLRTGFEKIDRVWSDVTNVLADTIPGIRVVKAFAQEKREAQRFREVNQHNLAVNDKLNKTWSLFTPTVSLLTEIGLLVVWAFGIWLVSRQQITVGVLTAFIAYIGRFYTRLDSMSRIVSVTQKAAAGAKRIFDILDHVSNVPETANPVKIGALQGRIEMKGLGFRYGNRSVIRGLDLQIEPGEMIGLVGHSGSGKSTLVNLICRFYDVSDGAIQVDGTDIRRFGVADYRRHIGLVLQEPFLFFGTIAENIAYGKPGATRAEIVAAARAAHAHEFILRLAQGYDSLVGERGQGLSGGERQRISIARALLINPRILILDEATSSVDTETEKEIQRALDNLVQGRTTIAIAHRLSTLRKADRLVVMDRGQVVEVGPHDELMAKQGAYWRLYEAQARQVDSEEGGQDGEESRIALATSQLAHTAQHAGNP

SEQ ID NO: 35923 - protein, 767 aa, Polaromonas sp. JS666
MATPLSPAEEALRDAAREYHRSPVRGKISITPTKPLSNQRDLSLAYSPGVAYPCLDIEADPSLAAEYTSRGNLVGVITNGTAVLGLGDIGPLAAKPVMEGKGCLFKKFAGIDVFDIELAEHDPDKLIDIIAAMEPTLGGINLEDIKAPECFYIERKLRERMNIPVFHDDQHGTAIISSAAVLNGLELVGKRIEDVRIAVSGAGAAALACLDVMVGLGVRRENVYVCDSKGVIYHGRPGGFDESKNRFAQETALRTLADAVNGADVFLGCSAPGVLTQDMVRTMAPSPIILALANPEPEIRPELAKAVRPDCIIATGRSDYPNQVNNVLCFPYIFRGALDCGATKITEEMKLACVRQIADLTKADISEEVARAYIGQELVFGPDYIIPKPFDSRLILRIAPAVAQAAEDSGVATRPITDMAAYRQELSRFVYSTGMLMQPVFNAARAIPDAHKRVAFAEGEDDRVLRAAQLVLDEGLARPILIGRPAVIETRIAKAGLRLRLGDDVECVNPEDDPRFRHYWETYHRIMGRHGVTPEAAKAAVRRSTTTIAALMVKLGDADAMLCGMVGRYDGHLEHVRDIIGLKEDASGFAALNALMLDKRTLFIADTFVNEDPSAEQLASIALMAVDEVRRFGIPPKVAFLSHSNYGSSNRASARKMRLAHELFARMAPDVESDGELHGDAALSEEVRRASLMESNMSGEANILICPNLDSANILFNVLKMTGGQGVTVGPILLGTAASAHILTTSATVRRVVNMTALAVASAAARR

SEQ ID NO: 35924 - protein, 265 aa, Polaromonas sp. JS666
MKLKALSTLAGLFASTVLTLVSPAHAADDSLTSIMAKKSIALGVASDFPPYGFMGSDFKLTGVDVATAQLIADKLGVKAEFVPVSTPNRIPYLQTKKIDLIVSALGKNAEREKVIDFTVAYAPFFQAVFGPKALSIKSFGDLAGKTIAVTRGTIQDDVLQQVAPPTLKIMRFEDDATTVAAFISQQTQLLATGAAVAAAAVQKNPQVQAEYKLLLKDSPNFIGVRKGETALLTKVNDILRAAKADGTLEQYSQKWLGRGTGVLPD

SEQ ID NO: 35925 - protein, 394 aa, Polaromonas sp. JS666
MSREVVVVSGVRTAIGTYGGSLKDISPTELAAQVVRESLARAGVEGSDVGHVVFGHVVNTEPKDMYLSRVAAINGGCAEGTPAFNVNRLCGSGLQAIISASQSILLGDTDVAIGGGAENMSRGPYASLSARWGARMGDSTMVDMVVGALHDPFQKIHMGVTAENIAAKWGISREEQDAIAVESHNRAQRATEAGYFKDQIVPVMLKSKKGEVAYVTDEHFRAGCTLADMAKLKPVFIKENGTVTAGNASGINDAAAAVVLMEAGTAKARGAKPLARLVAYAHAGVDPQYMGIGPVPATRLALKKAGLTVNDLDVIEANEAFAAQACAVTRELGLDPAKVNPNGSGISLGHPIGATGALITVKALYELQRIGGRYALVTMCIGGGQGIAAIFERM

SEQ ID NO: 35926 - protein, 126 aa, Polaromonas sp. JS666
MFRTLLKSKIHRVAVTHCELHYEGSCAIDEDLLDAANIAENEQIHIWNINNGERFVTYAIKGERGSGMISVNGSAARRAAAGDLIIIAAFAQVHNDQVSAHEPQLVFVDDKNRQTELRHKVPTQRM

SEQ ID NO: 35927 - protein, 446 aa, Polaromonas sp. JS666
MATILQNLPAGQKVGIAFSGGLDTSAALHWMKLKGALPYAYTANLGQPDEPDYDEIPRKALQYGAEKARLIDCRSQLAAEGIAALQSGAFHITTAGVTYFNTTPLGRAVTGTMLVSAMKDDDVNIWGDGSTFKGNDIERFYRYGLLTNPNLRIYKPWLDQLFIDELGGRAEMSAFMTQAGFGYKMSAEKAYSTDSNMLGATHEAKDLEHLNSGMKIVNPIMGVAFWKDEVEVKREEVTVRFEEGQPVALNGKTFSNTVELILEANRIGGRHGLGMSDQIENRIIEAKSRGIYEAPGLALLFIAYERLVTGIHNEDTIEQYRDNGRRLGRLLYQGRWFDPQAIMLRETAQRWVARAVTGEVTVELRRGNDYSILNTVSPNLTYKPERLSMEKVEDAPFSPLDRIGQLTMRNLDIVDTRDKLAIYTQAGLLSAGQGASPPQLKNDERK

SEQ ID NO: 35928 - protein, 426 aa, Polaromonas sp. JS666
MDMTEIHVIKQHLIDPEICIRCNTCEAICPVQAITHDSRNYVVDAEKCNLCMACISPCPTGSIDNWRTMPRIKAYSLTEQLGWDELPPELTPEELAAEGVVPGAMPEIEPVAPSLPAAVSGETAFNSAQYGATMPPWSAAHGYTNLYGAKAAEKFITATVVGNVRVTEVGKEYDTHHIVLDFGSMPFPVLEGQSIGILPPGTDEASKPHYARQYSIASPRNGERPGYNNVSLTIKRVLQDHQGNAVRGVGSNYMCDLQIGDKVQVIGPFGTSFLMPNHPRSNIVMICTGTGSAPMRAMTEWRRRLRQSGKFEGGKLMLFFGARTKEELPYFGPLQTLPKDFIDINFAFSRTLEQPKRYVQDAMRERAADLGVLLKDPNTYFYVCGLKSMEEGVVLALRDVAQQAGLSWETVGAALKQEGRLHLETY

SEQ ID NO: 35929 - protein, 235 aa, Polaromonas sp. JS666
MNFTKPLPKFDPRSIPVLGIDDHLAGVPLERLMPQALRDRFRHPPVWTPEHSVEKKFADREPALAAVLLPLVMRDELTLLLTERATNLSTHSGQIAFPGGRTDESDQDAVDTALREAHEEIGLPRDHVEVLGTLPTYVTGTAFIITPVVALVKPGFGLQPNPGEVADVFEVPLGYLMNPAHHRRHEVEFDGVLRQWLSMPYTELVGEAEGNESRERYIWGATAGMLRNLYRFLSA

SEQ ID NO: 35930 - protein, 298 aa, Polaromonas sp. JS666
MTVESDPYARKITFLGTGSMGLPMARRLCEAGYALQVWNRTPARAASLAALGATIHEQARAAARDADIVVSMLENGAVVQDVLFAQGVAAAMKPGSLFLDMASITPREARDHAARLGALGIAHLDTPVSGGTVGAEQGTLVIMAGGKPADFERSLPLLKVFGRATHVGPHGSGQLTKLANQMIVGITIGAVAEALLFATKGGADMAKVKEAITGGFADSRVLQLHGQRMVERDFAPRARLSIQLKDMRNALATAQEIGFDAPITGLFEQLYAEGVEHGLTDLDQSGLFVELASRNGMS

SEQ ID NO: 35931 - protein, 335 aa, Polaromonas sp. JS666
MGAPASPPVRKKILVFRELPPDQLARLQAMHEVTVANPRLPGQLAAFHAALASADGMIGSSYAITASLLASAPQLKVISSVSVGVDNYDLPALAARGIMLCHTPGVLTETTADTIFSLIMASSRRLVELASHVREGRWTRNIGEDLFGWDVHGKTLGILGFGRIGQAVARRAALGFNMPVLYHSRRPVDVAHELPELAGKATHTPFDELLQRADIVAAVLPLSKETRGLMGAREFDLMKPGAIFVNGARGAIVQEDALLNALDHGTLRAAGLDVFATEPLPMDSPLRTHPKVTALPHIGSATFETRHAMAVLATSNLLQALAGERPGAVFATGTS

SEQ ID NO: 35932 - protein, 340 aa, Polaromonas sp. JS666
MKLLDHKFATVFTVLGALLVLVAPQYLKNYGIYLLTYWLIFIIATMGLNLTIGYAGQKSLGHAAFFGIGAYTVAILMKAGFSFWLGLPAAALICFAVGLILGFPALRVQTIYLAFATLGFNTAIWLVMRNEEWLTGGTFGINNIARPAILGYSLEANRPYYYFVLVVTLILSGLLWGLLRSPWGKAFRALRDNPIRAESLGVDIRNYTLLSFAIGAVYAGIAGALFASLVQFIEPAPFAVGASIMMYLMVVVGGAGYFLGPIVGAAVGVVLPEWLRDVPGVANWYLPMFGAAVVVLMVWLPDGLLSIPDRIRDRRAARDASAARKIAAGMAATKRVGAAS

SEQ ID NO: 35933 - protein, 351 aa, Polaromonas sp. JS666
MPKIIRDFRICQDCLRKATMSVNPDVTASAGGTPAEPDFFNLKVVRKEAVAQGIYLFELGHPEGLDLPAFTAGSHLTVQVPNGARRNYSLCSDPADTGCYQIAVKRDAAGRGGSISMADDVQVGQLLAVSAPRNNFELHPRASSFLFIAGGIGITPVLSMMRHLKRQGRNPFKLIYCTRDADSTAFVQELTGPEFAAHVQLHHTQGDASQALDLWPVFETPGSAHVYCCGPRGLMDAVADMSGHWPSGSIHFESFGVDASTYAADTAFTVRLHKTGINVPVDAGQTILQALRACGHHVSSSCESGTCGSCRTTLLAGEAEHRDMVLSDDDKTHQIMVCVSRAKSAELVLDL

SEQ ID NO: 35934 - protein, 294 aa, Polaromonas sp. JS666
MKFSTLMTAVLLTAGLAATASAQTLKKVADSNKITVSYREASVPFSYLIGSTKAVGFSVELTEAIIDDVRKKVKKPNLEVAYMPVTSQNRIPLLVNGTYDLECGSTTNNSARGKDVAFSINMFYTGTRLLTKKTSGVKNYADLTKKTVASTTGTTNAQVIRKYNTEKNLDMQLILGKDHDDSLLLVESDRAMAFAMDDILLFGLMANSKNPAALQVVGDSLQVEPYACMLRKDDPEFKKLVDGTITRLMKSGEFTKLYAKWFESPMPPKGTNLGLPMSQQLKDNLKAMSDKPAT

SEQ ID NO: 35935 - protein, 353 aa, Polaromonas sp. JS666
MTTNAEHLARLRARYAGASGADMFDPAFKAVAEQIFSSSDRRKWPFADVPTFLDAPYRADGLAQPEPNLAGLDVALIGVPMDLGVTNRAGARLGPRAVRNVERIGPYEHALGLAPVTRLKMADVGDVPMRSRFSLDECHADIEACFNQVVNAGVIPLAVGGDHSITGSILKAVGRDRPVGMVHIDAHCDTAGTYEGSKFHHGGPFREAVLAGVLDPRRCIQIGIRGGAEYLWEFSFDSGMTVIHAEEFSKMGVEAVIRRAREVVGDGPTYVTFDVDSLDPAYAPGTGTPEVGGLSPREVLTLLRGLAGLNIVGGDVMEVAPQNDPSGNTALVGAQMLFEILCLVALSPAMANR

SEQ ID NO: 35936 - protein, 226 aa, Polaromonas sp. JS666
MTDTSRNMQQDQHLRARIEEMLRAFTLQAAERDQQHAAAVAVVITDEGHGAELPGFPRHAAWSTQAALLLTRRAGHLRKHAGQWALPGGRIDAGETAEQAALRELAEEVHLELDVSAILGRLDDFVTRSGFVITPVVVWAGAAQHIRPNPAEVASIHRIPIAEFLRADAPMLADEGHGGHPVLRMPVGNHWIAAPTAAILYQFREVCIEGRPTRVAHFEQPAFAWK

SEQ ID NO: 35937 - protein, 397 aa, Polaromonas sp. JS666
MAQTSPLIISGGGIGGLAAALVLAQDGHPVTVLEQAAAFGEIGAGIQLGPNIFRMFDYLGLTEVVNRVAFFPAGLGMNDVRTGEKVIRVALGDMARAAYGFPYGVIYRADLHQVFLDACRAQPHVTLRTHAKVESFDQSEGGVSVRLADGETVHGSALIGADGLWSRIREVVVGDGKPRVSGHIAYRAVLKREDVPAHLWSDDVLLWGGEKTHLVHYPLRRGELFNLVAVFHSNKYDEGWNTFGDTAELNERFAEACPQVRELLGKIETWKMWVLCDREPVKNWTDRRVTLLGDAAHPMLQYLAQGAGQAIEDAVVLREALRFTRGDIQKAFLKYQQARYLRTGRVQLTARFYGDIYHAAGVQRELRNQLFQSGTESAGFAGLKWMYDGIEPSKLFQ

SEQ ID NO: 35938 - protein, 392 aa, Polaromonas sp. JS666
MEDIVIVSAGRTAVGKFGGSLAKMPATELGAAVIKAVLERSGLSAEQVGEVILGQVLAAGVGQNPARQAVIKAGFPHGIPGLTINAVCGSGLKAVMLAAQSVATGDSEIVIAGGQENMSAAPHVLNGSRDGQRMGDWKMIDSMIVDGLWDVYNQYHMGITAENVAKKYGIDRESQDALALASQTKAAAAQDAGKFKDEIIPISIPQKKGDPLVFAADEFINRKTNAEGLAGLRPAFDKAGGVTAGNASGLNDGAAAVMVMTAKKAAALGLKPLARIASYATTGLDPAYMGMGPVPASTKALKRAGWKAQDLDLLEINEAFAAQACAVNKEMGWDTSKVNVNGGAIAIGHPIGASGCRILVTLLHEMARRDAKKGIASLCIGGGMGVALTLER

SEQ ID NO: 35939 - protein, 405 aa, Polaromonas sp. JS666
MDTPHFPIYMDYSATNPCDPRVVDAMIPWLREHFGNPASRSHAWGWEAEAAVENAREQVAALIGADPREIVWTSGATESNNLALKGAAHFYKTKGKHLITVKTEHKAVLDTCRELERQGFEVTYLDVQADGLLDMEALKAAMRPDTIVVSVMYVNNEIGVIQDIPAIGALCRERGIIFHVDAAQATGRVDIDLATLPVDLMSLTSHKTYGPKGIGALYVRRKPRVRLEAQMHGGGHERGMRSGTLPTHQCVGMGEAYRIAKAEMHEENKRIAALHERMLNGLKDVEEVFLNGHAEKRVPHNLNMSFNFVEGESLIMGIKGLAVSSGSACTSASLEPSYVLRALGRSDELAHSSLRMTIGRWSTEEEIDYAVETIKENVAKLRELSPLWEMFKDGVDLSTIQWAAH

SEQ ID NO: 35940 - protein, 407 aa, Polaromonas sp. JS666
MKPITKSAKLANVLYDIRGPIMDAAKQMEEEGHHLIKLNLGNLAVFGFDAPEEIQQDMIRNLPSSAGYSDSKGIFAARKAVMHETQKQGISGVTLDDIYLGNGASELIAMATNALLDDGDELLLPTPDYPLWTASTSLSGGKPVHYLCDEDNGWMPNLDDIRAKITPKTKGIVVINPNNPTGALYSDELLKQIVEIARTHGLVILADEVYDKVLYDGAHHTAIASLSTDVLTLTFNSLSKSYRSCGYRAGWLVVSGPKKRAEDYIEGLNMLANMKLCSNVPGQWAIQTALGGYQSINDLTGEGGRLRRQRDLAYELITAIPGVSCVKPSAALYMFPKLDPKVYPIKDDRQFFLELLKETKVMLVQGTGFNWASPDHFRIVFLPHEEDLREAVGRIAKFLENYRNNNI

SEQ ID NO: 35941 - protein, 413 aa, Polaromonas sp. JS666
MKIAIVGGGIGGLSLALAVKQRGLACDVFETVPEVREVGVGITLLPHAMRELAALGLQPQLEAAGIENEESVFFNRFGQFIYKEPRGRHAGYDLPEIGIPRGKLHRLLYEAALERLGSGAVHTDHRCTGVDQDDSGATVHFTQTSSGADLPSRRADVVIACDGVNSTVRRQFYPDEKVAFAGINTWRGVTRHQPILTGKSYLRVGSLHTGKMVIYPIVDRVDDEGTQLINWVAEIRRDNAAMNDWNRPGDLKDFLDIFKDWRFPWLDVAALITSAGQILEYPMVDKDPVPQWTFGRVTLLGDAAHPMYPRGSNGSAQALIDARVLAEQLAAHAGGDARAALQAYEELRLAPTAQLVLTNRSVPPDFINIKVDELSGGKPFANIDELISQQELRRISEYYKKVAGFSLDMPKAG

SEQ ID NO: 35942 - protein, 866 aa, Polaromonas sp. JS666
MRQDKLTTKFQEALSDAQSLALGNDNGYIEPAHLLAAMLRQDDGPRALLERAGVNVNGLTQAADSAVKKLPQVQGQDQIQVGPELARLLQATEKEAIKRNDQFIAGELFLLAVADSKADVGRIARENGLTRKSLEAAIDAVRGGQGVNSADAEGQREALKKYCMDLTERARLGKLDPVIGRDDEIRRAIQVLQRRTKNNPVLIGEPGVGKTAIVEGLAQRIVAGEVPDSLKGKRVLSLDMAALLAGAKFRGEFEERLKTVLNELAKDEGQTIVFIDELHTMVGAGKAEGAMDAGNMLKPALARGELHCVGATTLDEYRKYIEKDAALERRFQKILVDEPTVEATIAILRGLQEKYEVHHGVQITDPAIVAAAELSHRYITDRFLPDKAIDLIDEAAAKIKIEMDSKPEVMDRLDRRLIQLQIEREAVRREKDEASQKRFGLIEVEIAKLQKEISDLDEIWQAEKAQALGSKDVMEEIDRIRFQIEEFTRKGDFNKVAELQYGKLPELEKRLKAAQDTEAQKETSDVPKLLRTQVGAEEIAEVVARATGIPVSKLMQGERDKLLLMEGKLHERVVGQDEAIGAVANAIRRSRSGLSDPNRPTGSFLFLGPTGVGKTELCKALAGFLFDSEDHLIRVDMSEFMEKHSVARLIGAPPGYVGYEEGGHLTEAVRRKPYSVLLLDEIEKAHPDVFNVLLQVLDDGRLTDGQGRTVDFKNTVIVMTSNIGSPIIQSMVGQPAEDIKDAVTDELKNYFRPEFLNRIDETVVFHALDAKNIESIARIQLKVLMERLQKMDLAMEVSEAAIAELAKVGFDPVFGARPLKRAIQQRIENPLSRLLLEGRFPPKSVIPVEVDPVREPGVFKFERAAH

SEQ ID NO: 35943 - protein, 315 aa, Polaromonas sp. JS666
MKPRLLQHVAIPPLLATEFNTRYDAHPLWKEADPAAFLARHGHEFTGYVTSARFGVDDATLAAMPNLKVISSFGVGTETLPLEAAQARGIAVGYTPDVLNDCVADTAFGLVMDVARRFSASDRFVRARRWLQGAYPLATRVSGKQLGILGLGRIGQVVARRASGFDMEVRYHNRRPNPAVPYTYESSIESLARWADFLVVVSAGGPETRHLVTASVLRALGPQGFLINVSRGSVIDEDALIQALEEGTIAGAGLDVYADEPRIPERLLALDQVVLLPHLASATNETRQAMAELVVDNLDAFYATGKLRASVPLPA

SEQ ID NO: 35944 - protein, 594 aa, Polaromonas sp. JS666
MEVSKAEIASAAAASANTNANSQELRGAEILVKSLQAEGVKYIWGYPGGAVLHIYDAFYKQDSIQHILVRHEQAAVHAADGYARATGDVGVALVTSGPGVTNAVTGIATAYMDSIPMVIITGQVPTHAIGLDAFQECDTVGITRPIVKHNFLVKDVRQMADTLKKAFHIARSGRPGPVVVDIPKDVSFNKTLYTGYPQSVEMRSYNPVRKGHGGQIRKALQLLMSAKRPYIYTGGGVLLSNASQELRTLVDMLGYPCTNTLMGLGAYPASDKKFLGMLGMHGTIEANNAMQHCDVLLAVGARFDDRVIGNPKHFAQNERKIIHVDIDPSSISKRVKVDIPIVGDVKDVLTELISMIRESGLKPDANALGGWWDTIEGWRKRDCMKYSMGKGDVIKPQHVIETLWNLTKDADTYITSDVGQHQMWAAQYYKFDEPRRWINSGGLGTMGVGIPYAMGIKLAKPDSEVFCITGEGSVQMCIQELSTCLQYNTPIKIVSLNNRYLGMVRQWQEVEYAGRYSSSYMDALPNFVKLAEAYGHVGMLIEKPQDVEPALREARKLKDRTVFMDFRTDPTENVFPMVQAGKGITEMLLGSEDL

SEQ ID NO: 35945 - protein, 608 aa, Polaromonas sp. JS666
MYQYTEFDRQFVKARASQFRDQLTRWQAGQLPEDEFRPLRLQNGWYVQRYAPMLRVAVPYGELSSAQLRVLAKIAREYDQPNAALLEGAQATQDKLGAIPLKNGHSVHSKLTTGYAHFTTRQNVQYNWIPLDKSADVMDLLASVNMHGIQTSGNCIRNITSDERAGIAVDEIADPRPFGEIMRQWSTLHPEFSFLPRKFKIAISGAREDRAAIGWHDVGLQLLRNAEGELGFKVLVGGGMGRTPIIGTVIREFLPWNQIMNYLEAVVRVYNRYGRRDNIYKARIKILVKAEGQRYIDDVEAEYKQIMEHDGGPHTITQAEYDRVAACFVAPTLNCDRKEADAKIAHILRAAAEDDVEFGRWLQQNVAPHQNPDLRAVTLSFKRLGQAPGDATAAQLDVAADLADRFSAGEMRVTHEQNLLLPWVRCDELPELWRAARKAGFAKPNIKLLTDMIACPGGDFCSLANARSIPIAEAITERYQDLDELHDLGEIDLHISGCINSCGHHHSGHIGILGVDKDGKEWYQVSLGGSDGSTLSGPAVPGKAVGPSFSAAEVPEVIEAVLETYRQQREGGETFIATLRRVGAEPFKAAANGARFSAARAETAETAA

SEQ ID NO: 35946 - protein, 391 aa, Polaromonas sp. JS666
MTTILERTPKLETKLPAVGTTIFTVMSTLAAEKGAVNLGQGFPDFECDPQLVNAVTDAMTKGLNQYPPMTGVPVLREAISAKVAKLYGHRYNANTEITITAGATQAIITVILAVVHPGDEVIVLEPCYDSYVPNIELAGGKVVRVPLTPGTFRPDFDKIAAAITPQTRAIIINSPHNPSATVWTQADMLKLQDILAPTDVLLISDEVYEHMVFDAAKGCMHQSASLFPGLAARAFIVSSFGKTYHVTGWKVGYVAAPAALTAEFRKVHQFNVFTVNTPVQYGLAAYMADPKPYLDLPAFYERKRDLFRAGLAKTRFKLLPSEGTYFQCVDISEVSDLNEADFCQWLTTEIGVAAIPLSAFYGNGFDQRVVRFCFAKKDETLHSALGRLAKL

SEQ ID NO: 35947 - protein, 570 aa, Polaromonas sp. JS666
MTTQLAGHLLVDCLIAQGVTHAFGVPGESYLAVLDGLHARQGQIEFITCRQEGGAAFMAEAHGKLTGRPGVCMVTRGPGATNASIGVHTAFQDSTPMVLLVGDVASDCRDREAFQEVDYASFFGPSTKGFAKRVERIDDADRIPEYVARAFATAVNGRPGPVVLVLPEDMLTQMTGAQPLPRVEAVQAWSDPGSVRTLREMLLQSQRPFVIAGGGGWTPQSAQALQRFAENWKLPVGNAFRFQDTFDNHHPQYAGDVGIGLNPKLAARIKASDLIIAIGPRLGEMTTGNYTLLEAPRPRQKLVHIHSSAEELNRVYQADLAINATMNAAARSLEVLTAPAELPWEAWTASANNDYLANLQTQEGQKLPGDIDMAAIVGLLQKHLPQDAVLTNGAGNFASWVHRFFKHHGLVKGNKTQLAPTVGAMGYGVPAGIAANIVSGRTAFTIAGDGDFLMNGQELATAVQHGAKSIIVLLNNGMYGTIRMHQEKTYPQHVSGSRLNNPDFAALARAYGYAGVRITRTAEFEAELLAALARKEGTVIEVTLDPEVITTRGTLSSITQAALTQSLQKS

SEQ ID NO: 35948 - protein, 422 aa, Polaromonas sp. JS666
MALIVHKYGGTSMGSTERIRNVAKRVAKWARAGHQMVVVPSAMSGETNRLLGLAKELAPARPGDDYHRELDALAATGEQASSALLAIALQSEGMQAVSYAGWQVTIKTNNAYTKARIESIDDERVRADLDAGKVVIITGFQGVDEGGNVTTLGRGGSDTSAVAIAAALKAHECLIYTDVDGVYTTDPRVVPEARRLHTVSFEEMLEMASMGSKVLQIRSVEFAGKYKVPLRVLSSFTDWDIDINEEARSGTLISFEEDENMEQAIVSGIAFNRDEAKISVLGVPDTPGIAYQILGAVADANIEVDVIIQNISKDGKTDFSFTVHRNDYSKAVDLLKTQVLPKLGAQEVTGDAKICKVSIVGIGMRSHVGVASKMFRVLSEEGINIQMISTSEIKTSVVIDEKYMELAVRALHKAFDLDQPAA

SEQ ID NO: 35949 - protein, 398 aa, Polaromonas sp. JS666
MKIAQRAQRIEPFYVMEVAKAASALAQEFAGSGKPMIFLNIGEPDFTAPPLVQEAAARAIAQGTTQYTQATGLPALRERISGWYASRFGVQVAPSRIIVTAGASAALQLACLALIEAGDEILMPDPSYPCNRHFVSAAEGNAVLIPTTAEERFQLTREKVQAAWNDKTRGVLLASPSNPTGTSIAPEELQRIHEFVHGQGGVTLIDEIYLGLSYEEHFGHSALAMPGELGQSVISINSFSKYFNMTGWRLGWLVVPEALAPVVERIAQNLFICASTVAQYAALACFEPDSLQEYERRRAEFKARRDYFIPELNRLGLRVPVMPDGAFYAYADCTETAARLGVSGSWDLAFELMKRAHLAVTPGRDFGQAAPEKFVRFSTANSMEQLREAVARLRTLLA

SEQ ID NO: 35950 - protein, 346 aa, Polaromonas sp. JS666
MNPIHKASPQGMQRRQVLAGAMAAALPCLPAVSSAAAAKSILVGGLPVTCNLTLPVACVAKAASNAKGGGPAFEFEYSKYSGWPEIKESLMTGRIQAAYMLAPLVMDLTDKKIPLKIVSLGHRSGAVIMVRTDSAHKRFTDLKGKRIAIPSRFAVDFLFLRKMLAKEGMTPKDIEIIEMAPPDMPAALYAKAVDAYCTGEPFGAAAQRAGYARPLSMTRDEWRNYICCVLTVREELIKDNRPLVQELVNYVQAAGTWLDLGPASRNKAVDIAAGRKFFNQDPNIIRFVMENPADRVTYGDLRMIKAEFDDLMKLSLEAGTIKRPVAYESYVDESFVKNIKPVTITL

SEQ ID NO: 35951 - protein, 241 aa, Polaromonas sp. JS666
MDDPILTIDERAAINSGRWFSSLSPSLRHDILRCAYVKRYKDGELIAARGDPPEEWIACAKGAVRVSSTSLSGKQITLTYVEPGIWFGDVAIFDGDRRTHDAYAHGDTTILCVAKADFRKILAAHVELYEAMLRLHARRLRQLFGLVEDLNTLPLRARLAKQLLHLVRCYGVPSLADGQEIRIGLQLAQEELAQLLGASRQRVNQELKSMEREEAIRIEPGGLVVRNREALMRISEADMDK

SEQ ID NO: 35952 - protein, 328 aa, Polaromonas sp. JS666
MSKPKILVARAVFPEVIARLEQHFEVQANQDDQTWSKAELTERLRDKDGAFTTGGDRIDAEVLAACPRLKICANMAVGYNNFDVDAMTAARVLATNAPDVLTETTADFGFALLMATARRITESEHYLRAGKWTKWSYDMFAGSDIHGATLGILGMGRIGQGIAKRGALGFGMKVIYHNRSRLEAALEAECLASYVSKDELLKTADHLVLVLPYSLASHHTIGAAELALMKPTATLINIARGGIVDDAALAAALRDRRIAAAGLDVFEGEPKVHPDLLTVPNVVLTPHIASATVPTRLAMANLAADNLIAFFDGKKPLTPLNPAVLTVQ

SEQ ID NO: 35953 - protein, 293 aa, Polaromonas sp. JS666
MSKLGFIGLGIMGSPMASHLITAGHEVFLHTRSKVPADLLTGKAKACSSIREVAEQADIIFLMLPDTPDVAKVLFGENGVASGLTKGKTVVDMSSISPMETKEFAQKINALDCDYLDAPVSGGEVGAKAASLTIMVGGPDAVFERVRPLFELMGKNITLVGGNGDGQTCKVANQIIVALNIAAVGEALLFASKAGADPAKVRQALMGGFASSRILEVHGERMIKRTFAPGFRIGLHQKDLSLALAGARTLGVALPQTAGAAQLMQACSANGMQDLDHSALVRALELMANHEIA

SEQ ID NO: 35954 - protein, 647 aa, Polaromonas sp. JS666
MGRIIGIDLGTTNSCVSIMEGNTPRVIENSEGARTTPSIVAYQEDGEVLVGASAKRQAVTNAKNTLYAIKRLIGRKFTEKEVQKDINLMPYKIAAADNGDAWVEVRGKQISAQQVSADILRKMKKTAEDYLGEPVTEAVITVPAYFNDAQRQATKDAGRIAGLEVKRIINEPTAAALAFGLDKQEKGDRKIAVYDLGGGTFDISIIEIADVDGEKQFEVLSTNGDTFLGGEDFDQRIIDYIIAEFKKEQGVDLSKDVLALQRLKEAAEKAKIELSNSAQTDINLPYITADASGPKHLNIKLSRAKLEALVEELLERTLAPCRTAIKDAGVSVGDIHDVILVGGQTRMPKVQEMVKALFGKEPRKDVNPDEAVAVGAAIQGQVLSGDRTDVLLLDVTPLSLGIETMGGVMTKMIKKNTTIPTKFAQTFSTAEDNQPAVTIKVFQGEREIASGNKALGEFNLEGIPPAARGTPQIEVSFDIDANGILHVGAKDKGTGKENKITIKANSGLSEAEIQQMVKDAELHSADDKKKVEFVQAKNNAEAMVHSVRKSLGEYGDKLEVGEKEKIETAIKDMEEALKGDDKDAIEAKNTALMEASQKLGEKMYADMQSSQAAGAEAAAGGAGAEQAHAKPADDNVVDAEVKEVKKG

SEQ ID NO: 35955 - protein, 372 aa, Polaromonas sp. JS666
MLIGIPKEIKNHEYRVGLTPSSVRELAAAGHRVIVEHNAGSGIGASDAEYEKAGAGIVQGADEVFARADMVVKVKEPQAAERAQLRPGQLLFTYLHLAPDPQQCKELVDSGAVCIAYETVTQAGGGLPLLAPMSEVAGRMSVQAAAHSLERAHGGRGILLGGVPGVAPAKIVILGAGVVGSNAAQIAVGTGAQVVVIDRSLDALRRMDRLLGARVITLFSNRDNIEEQVLSADAVIGGVLIPGAAAPKLVSRELLSRMKPGSVVVDVAIDQGGCFETSHATTHADPTYVVDGVVHYCVANMPGGVPRTSTYALNNATLPFVLALANKGWRQALKDDVHLRNGLNVADGKVTCLEVANDLRYVYHAPQTLLAA

SEQ ID NO: 35956 - protein, 594 aa, Polaromonas sp. JS666
MTSSASSAPPKGSPRSLSGLVPFLRPYRGRIALALFFLVMAAVATLVFPLALRSLIDGGLSVADKGAQLMALRTHFFELFAVAAALGLFSAGRFYMVSWLGERVTADLRNAVYSHVVRQSPEFFETTQTGEVLSRLTGDTTLVQTVVGSSLSMGLRNAVMGVGALGMLVYTNPYLMVQVLGILVLIVAPSVWFGRRVRKLSRASQDRVADSSAIAAEVLNAIPVVQSYTAEAREAARFDASTTTAFNTAIRRTRARSVLVAFIIIATSAALLWGLYQGTQAVMRGDISAGHLGQTVVYVIILASATAVLGEVYGDLLRAAGATERLMELLETRSPVVSPSKPASAPEIRSGSAVKFEAVTFHYPSRPAQAALSNFDLSVAPGETVALVGPSGAGKSTVFQLLLRFYDPASGRIELDGMRTADMALEDLRHRVGIVPQDAVIFSTSALENIRYGKPDATDEETRAAAKAAFAHEFITALPEGYDTFLGERGVRLSGGQRQRIAIARAMLKNSPLLLLDEATSALDAESERMVQAALESAMKGRTTLVIAHRLATVQKADRIVVLDHGRLVEQGTHAELVSRGGVYARLAALQFNA

SEQ ID NO: 35957 - protein, 414 aa, Polaromonas sp. JS666
MTELLKSSLTRRTVLQAAAVGAVGINPALRAAVYAQGSDAPEKKEVKIGFIPLTDCASVVMASVLGIDQKYGVKIIPTKEASWAGVRDKLVNGELDFAHVLYGLIYGVHMGTAGPKKDMAVLMTLNNNGQAITLSKKLADKGAVDGAGLAKLMASEKREYTFAQTFPTGTHAMWLYYWLAANGINPMKDAKVITVPPPQMVANMRVGNMDGFCVGEPWGHRAIMDGIGITAVTTQDIWKDHPEKVLGTTAEFTKKYPNTTRAVTAAIIEAGKWIDASLTNKNKMAETVADKAYVNTSVDAINQRILGRYQNGMGKTWDDPNYMKFFNDGAVNFPYLSDGMWFLTQHKRWGLIKDHPDYLAVAKQINQIDIYKQAAAAAKVSVPKDVMRTSKLIDGTVWDGKDPKKYADGFKVRA

SEQ ID NO: 35958 - protein, 271 aa, Polaromonas sp. JS666
MQPAATTVTPFLKWAGGKRWLIEKHPYLLGGKFTRFIEPFVGGGAVFFSLQPDSAILCDKNEKLIEVYATIKSNWQRVEDLLVEHQNKHSPEYYYEIRSKDYRTPETRTAQLIYLNRTCWNGLYRVNKKGEFNVPVGTKQTVILQTDNFEGVASILKRAELICGDFDVAMSKAGENDFVFVDPPYTVKHNYNGFVKYNENIFSWDDQLRLRDAVKAAISRGAKVLVTNACHESIKRIYAGIGEMCTVDRASVIAGKASARGRYEEVIIKCF

SEQ ID NO: 35959 - protein, 612 aa, Polaromonas sp. JS666
MTSPAPSKAGPKGTAAAAPADKENHKPSNFLRQIIEKDLAEGTYATRRWGGSPGDAAHHASGQPDPARVRLRFPPEPNGYLHIGHAKSIYLNFGLARDYGGVCHLRFDDTNPEKEDTEYVSSIIEAVKWLGFDWENNGPSGNECNLYQASDYFDFMYRAAEYLIESGNAYVDEQTAEEMRLSRGDFGHPGTNSPFRSRTPEQNLARFREMRDGLHEDGSMVLRAKIDMASPNINMRDPAIYRIRRAHHHNTGDKWCIYPMYTFAHPIEDALEQITHSICTLEFEDQRPFYDWLLDRLCEGGLVATPHPHQYEFARLNLTYVLTSKRKLAQLVYDHKVTGWDDPRMPTIVGLRRRGYTPEALHLFAERIGVTKSDSWIDYSTLEGALRDTLDPIAPRAMAVLDPVKLVLTNWDTVMGAGKLDDCSAPVHPHHPELGKRSFKIGKEVWIERTDFEETPPKGFFRLFPGNKVRLKYGHVIECTGATRDANGQVTEVQATLIPDTKSGTPGSDAIKVKGVITWVGVNDAVQAEVRLYDRLFKEAHPGTGEKDFMEELNPDSLKVVTAYVEPSLASAPAGQRFQFERHGYFVTDIVDHKPGKTVFNRVTGMKDSWGK

SEQ ID NO: 35960 - protein, 274 aa, Polaromonas sp. JS666
MPTNELFPVTNHAQPVLRWAGSKRRITPILSAYAPPKYERYFEPFVGSGALFFCLRPPLAFIGDVNPEVTSTYQALKDAPSQVAQHLTEIPKTKDAYLLLRQLRPADLTTAQRAARLIFLMKSCFNGVYRTNASGQFNVPFGSTIYKLPTSEELQSVSDALKLTQVRTGDYKSWLDIAGVGDFIYLDPPYSCSSRYRGEYGYDAIFGDVQLEELLTCCKALQNRGAKVMLSYKNNKQVVNALKDWRILNLAVPRSVNANSMGRTPAAEILAMNY

SEQ ID NO: 35961 - protein, 329 aa, Polaromonas sp. JS666
MKSTQTWQPATVAAVRDATPTVREFEIRPAEGSAAPWQAGSHLQLQVLVNGKVQTRSYSLVGLPDGVSYRIAVKRMDDGRGGSLAMWRLAVGDRLQISDPQNHFQLDLSAPHYLIVAGGIGITPLVMMAQQLQGQCQKSGATLRMLYGARTQEELAFLPLLREALGDALQTFVAGRGESMDLAAAIGALPAGGQLYTCGPVSMLEAVRKSWAQAGRPLADLRFETFGSSGRFAAQAFRVRVPRHQVDIMVPADTTLLDALESAGVESIFDCRRGECGLCAMDVLALDGEIDHRDVFLSEHEKQQNTRICTCVSRVVGSLTLDSSYRPEA

SEQ ID NO: 35962 - protein, 393 aa, Polaromonas sp. JS666
MLTAQQRAIVKSTVPLLESGGEALTTHFYQILLTEHPEVRPFFNQAHQANGDQPRALANGVLMYARHIDKLEQLGGLVAQIINKHVSLQIEPAHYPIVGACLLRAIREVLGAEIATGEVLAAWGAAYGQLADILIGAEEKIYAETAAAPGGWRGARRFIVARKVAESAEITSFYLQPEDGAALAAFQPGQYLGLKLVINGEEIRRNYSLSAAPNGRDYRISVKREPGGVASCYLHDELQEGGGLDVFPPAGEFVLADGDRPVVLISGGVGITPTLAMLDAALERQRPVHFIHFARNKSVHAFRDALATRQARHAQLRHFYVYDEHAGEADAPHATGLVDSGQLAQWLPASRDVDAYFLGPKPFMRRVRQQLRELGVPESQTRYEFFGPASALD

SEQ ID NO: 35963 - protein, 579 aa, Polaromonas sp. JS666
MTFEELKLAPAILKAVLEQGYDTPTPIQAQAIPAVLAGSDLLGGAQTGTGKTAAFTLPMLQRLSTEPRLTNRRGVNAVRALIMTPTRELAAQVEESVRTYGKYLDLTSMVMFGGVGMGAQIDKLRRGVDILVATPGRLLDHAGQGTLDLSQVQILVLDEADRMLDMGFIHDIKKVLALVPKHKQSLLFSATFSDEIRELANGLLRDPLHIQVTPRNTTVQRITQTIHPVGRSKKKALLTHIINEHNWSQVLVFTRTKFGANNVAEHLTKNGIEAMALHGNKSQTARTQALQGFKDGTIRALVATDIAARGIDIDELPHVVNYEIPNVSEDYVHRIGRTGRAGNSGEAVSLVCLDEEGFMQDIERFTKQNIEKVLVPGFEAEPGERAEPLAMGRQTIWGGLGKPPSRDVMQAAAKAARSEMMQRIRDTKGAQPARGASGGGNGGNGGNGGGRGRGPAGGGNGSGNGSGRGPRTPNPGQPRQNSGYSQGGQPAQPRHAQARQRDEQPRAPRNDSRSEPRNDFDNQQPASHASSGFPSSGQPTGNRNNFRGNRSGGGGGSGGAGGRGNGPRRPGGPGSFTGR

SEQ ID NO: 35964 - protein, 315 aa, Polaromonas sp. JS666
MSKPEILAVAKLPPYLIEPLREIFVVHEQIHQTDPAAFAAAAGRIRAIVGSGESKVPRSLMAQLPALEMISIMGVGYDGVDVTAALERNIRVTHTPGVLNDDVADLAIGLMLSVARRIPQADQYVRSGRWPEGPMPLARKVSGERLGIVGLGRIGQAIATRAEAFGMSVAYTARSRKAELPYAYYPSAQALAAEVDFLVLITPGGAGTRKLINADVLKALGPQGYLINVARGSVVDEAALVEALQQGVIAGAALDVFENEPVVPSALWTLDNVVLAPHIGSATRQTRGAMADLAASNLRAHFAGEPLLTPVPECQ

SEQ ID NO: 35965 - protein, 398 aa, Polaromonas sp. JS666
MIKQAVIAGGGIGGLAAALSASRAGWDIRLFERAPAFSEVGAGVQLGPNVVKVLHGWGLAQPLEAVAAFPGRLQVRSAVSGQALGELPLGASMVRRYGAPYVTLHRADLHGLLLQAVQLQTDAKLHLDRPLQSFSQTAQAVTVKTEGGPEIEGDALIGADGVWSTVRQQLLGDGLPRRTGHLAYRALVSQASLPEKLRTQHVTVWLGPRMHVVQYPVRSGDWLNVVAIVHGEVAADADPWDHSANAADLAAALAGSCAALRELVDALAGWRLWALSDRAPMQGAHQHAIGRVALLGDAAHPMLPYLAQGAGMAIEDAAELGHTLAQALDPAFDVPTMLQRYALNRWQRNAQVQARALRNGQIFHAGGLLRWGRDTALKVLGEKLLDMPWLYGGVSRVL

SEQ ID NO: 35966 - protein, 314 aa, Polaromonas sp. JS666
MLAQALSSRAAAGAVPDTPPVETQRCGLIAIVGKPNVGKSTLLNALVGQKISITSRKAQTTRHRITGVRTVGATQFVFVDTPGFQTRHGNALNRSLNRTVVGAVNDVDLIVFVVEAGQFNLADAKVLALLPAKTPAILLANKFDLIYRRAELAPWLRSMQERHNFAEFVPMSANNAKDIERLFGICEKYLPVQPWMYRADELTDRSDRFMAAEIIREKLFRLTGDELPYTSTVIIDKYEEEGNLRRIAATIVVERDGHKGMVIGEKGEKLKRIGTESRHELETLTGNKVFLEIWVKVRSGWADDEARVKTFGYE

SEQ ID NO: 35967 - protein, 319 aa, Polaromonas sp. JS666
MSTTLNAFVHTLRHEADDVISVELRPLPGAEFPAFTAGSHIDLHLPNGMERSYSLSNSCEERNRYVVGVLRDRASRGGSRCVHEQLRVGMRLPISAPRNNFPLHEEAGHTVLIAGGIGVTPILSMARRLKAAGRPFEVMYFARSRQGAAFVVELEALGMPLMLHFDDEKGGPPDLKALLSARAPDAQTHYYACGPTVMLDAFEKICGELGHENAHIERFSAVAVAPSANAHATFTVELRRSGRTFTIKPGKSILDTLLDAGVSVDHSCCEGVCGSCETRVLAGEPDHRDSILSAKERASNKVMMLCVSGCKSESLALDL

SEQ ID NO: 35968 - protein, 274 aa, Polaromonas sp. JS666
MTKREPRALINNAMHIQASPLVPWVGGKRRLAQFILPMFPDHSCYVEPFCGAAALFFMKPPVRVEVLNDVNSDLVRLYRVVTHHLDEFIRQFRWALNSRELFNWLQETPPATLTDIQRAARFYYLQKCAFGGKVKGQSFGTATTAKASINLLRMEEDLSAVHLRLHQVFIEHLDWAKCVEKYDRPHSLFYLDPPYWGTEGYGVDFGLEQYDRMAELLRTMKGKAAVSVNDIPEMRQAFKGLSIKRLVTSYTLGRSGEGRQAKGELLITNFKPGG

SEQ ID NO: 35969 - protein, 309 aa, Polaromonas sp. JS666
MQAIVKIGTFAGELQQTIDREFQCHGPEDIARDDGLRQSIRGLITRSNYQVPLALLELLPALQVISTCGVGYDGIPVAYAQARGIAVTHTPGVLDDAVCELGVGLLLGLLRDIPASDRFVRDGRWSDSAYPLTTSLAGKAVGIVGLGRIGRGIAARLQPFGVALAYSGSPKIDVPYRHVQSVLALAGECSILIVCCKGGSETRHLVNAEILQALGPAGYLVNIARGSVVDEEALVHALTTGGIRAAALDVFEDEPLRNSALTSLPNVLLSPHAGSATREARTAMLRLTLDNLHAVLNGQPALSPTPRIG

SEQ ID NO: 35970 - protein, 298 aa, Polaromonas sp. JS666
MKLKLAALSIALLATGGAIAQANDTIAKVKASGVVTMGVRDSSGLSFTLGDGKYAGYHVDVCQRILARLEKTVGKKLEVKYLPVTSQNRIPLVQNGTVDIECGSTTNNATRQKDVAFAVTTFVEEVRIAVKADSGITSIAQLNGKSVATTTGTTSVQTLRKNERATGIDFKEVFGKDHSDSFLLLESGRADAFVMDGSILASNIANSKNPAGFKIVGEVLSVEPIAIMMRKDDPAFKKLSDDTIKDLIKSGELAKIYDKWLMQPVPPKNVRVGLPASDSTKAAWATPNDKPMEDYAKK

SEQ ID NO: 35971 - protein, 460 aa, Polaromonas sp. JS666
MSRLVVVSNRVADPRKTAAGGLAVALGDALNATGGMWFGWSGTVIEGGAPGEGELHVQQAGNVKLATVDLSAEDHAGYYLGYSNGVLWPVFHYRIDLARFDAGNIRAYRRVNQLFARKLMTQLRPDDIIWVHDYHLIPLAAELRAMGATQRIGFFLHIPLPPQQVLAAIPQHEWLMRAMFAYDLLGFQSEADLQNFSHYVQAEAGAEDLGDNRFRAFNRTVRAGAFPIGIDVDEFAALTHAKEGHDMYERMKDEYSRRKLLLGVERLDYSKGLPQRLRAFKSLLEKYPENIRSATLIQIASPSREDMGTYTDLLQELESLCGAINGDFGELDWMPVRYMHRNVARKRLPGLYRVARVALVTPLRDGMNLVAKEFIAAQDPADPGVLVLSRFAGAAEQLKEALLVNPYDTDGTADTIQHALQMSLQERQGRHQRLLKNIREQDVHWWRKTFLDTLRDAGSD

SEQ ID NO: 35972 - protein, 398 aa, Polaromonas sp. JS666
MKQVQEAYIVAATRTPIGRSHRGFFRNTRPDDLLVKALQAALAQVPTLDPKAIEDIICGCAIPEGPQGLNIARIGAVLAGLPTSVGGITVNRFCASGLSAVQMAADRIRVGEADVMIAAGTESMSMVPMSGNSPSLSPEMFANDENVGIAYGMGLTAEKVAQQWKVSRDAQDQFAYESHMKALKAQQAGEFTNEITPVEVTDRTANLETGEVIATTRTVSLDEGARPDTTVEGLAKLKTVFAARGSVTAGNSSQTSDGAGALILASEKAVKEFGLKPLARFVSYAAKGVPPHIMGVGPIEAIPAALRYAGLKQDDIDWFELNEAFAAQSLAVINTLGLNAAKVNPMGGAIALGHPLGATGAIRAATVIHALQRHQLKYGMVTMCVGMGQGAAGIFERV

SEQ ID NO: 35973 - protein, 656 aa, Polaromonas sp. JS666
MCGLAGYFSGQWPADGEQASARLKAMTDAIAHRGPDSDGYWLDAATCMALGHRRLAILELSAAGAQPMHAASGRYVIAYNGEIYNHLDLRADLQKSGQSPAWRGHSDTETLLAGFDAWGIQGAVERTVGMFAFAVWDRQERMLTLGRDRLGEKPLYYGWQGSGSSAVFLFGSELKALRAHPAFGAQINRDALCLYMRHNNVGGSHSIYQGIHKLPPGTLLTVSRQTPEPVIRPYWSGAEVARCGVAQPFGGTSGEAVDALEALLKDAVRQQMMADVPLGAFLSGGVDSSAVVALMQTQSLRPVKTFSIGFHEAAYNEAEHAKAVAQHLGTEHTELYVTPEQAMAVIPRLPTLYDEPFADSSQIPTFLVSQLARQHVTVSLSGDAGDELFGGYNRYQLTASLWRKLSAAPLPLRRAAAWGLTRFSPQSLNSLAALMPASARWAHMGDKLHKGAGVMAGRTVEDLYLGMVSDWHDPAAVVIGGREPATLLRGRRPDLPGLTDVERMMALDMLSYLPDDILTKVDRAAMGVSLETRVPFLDHRVVEFAWRLPLHYKLRQEGGRYTTKWALRQVLYRHVPQALIDRPKMGFGVPIDRWLRGPLRDWAEDLLSETRLKREGYFKPAPIRQKWAEHLGGQRNWAPHLWTALMFQAWLQANHA

SEQ ID NO: 35974 - protein, 393 aa, Polaromonas sp. JS666
MSDSIVILGAARTPMGGFQGDFSSLAAHDLGGAAIKAAIERAGIAPEKVDEVLFGNCLMAGQGQAPARQAGFKGGLPASAGAVTLSKMCGSGMEATMLAHDQLMVGSRDVMVAGGMESMTNAPHLLLKGRSGVRIGHDRIFDHMMLDGLEDAYEPGRAMGTFGEQCAEKYQFTREAQDAFAVASVQRAKAATESGAFKAEITPVTVKGRAGDTVISIDEGPGKVKLDKIAALRPAFKKDGTITAASSSSINDGAAALVLTRESTAKELGATPIARIVGHATFAQAPEWFTTAPVGAVQKLLKKIGWSVKDVDLWEVNEAFAVVPMAAMKELGISHDIVNVNGGACALGHPIGASGARIIVTLIHALKARGLKKGVATLCIGGGEGTALAVELM

SEQ ID NO: 35975 - protein, 194 aa, Polaromonas sp. JS666
MQSTMKLVILDRDGTINSDSDDFVKTPEEWLPLPGALEAIARLNHAGWHVVIASNQSGLGRGLFDVASLNAIHAKMNKMLAALGGRVDAVFYCPHSPEESCNCRKPLPGLFEQIGARFGVPLKGVPTAGDSLRDLLAGAAAGCEPHLVLTGKSAQYRNGVPPEGMPPGTLVHRDLSAFADFILERSARPAPASL

SEQ ID NO: 35976 - protein, 256 aa, Polaromonas sp. JS666
MLEIRNLHVSVDDKPILRGIDLTIRAGEVHAIMGPNGSGKSTLAHVLAGRDNHVVTAGEVRYEGRNLLDLPPEERARAGIFLAFQYPVEIPGVANIYLLKAALNAQRLHRGEPELDAVDFLALVKGKLALMGMDTSLLYRAVNEGFSGGEKKRNEILQMAVLEPKLAILDETDSGLDIDALQVVAGGISAMRSPERAIVLVTHYQRLLNYIVPDHVHVLAQGRIALSGGRELALELEKHGYGWIEAETSRQAGVVL

SEQ ID NO: 35977 - protein, 303 aa, Polaromonas sp. JS666
MSRRIVSLAVALFLCAGSWTVEADTLDKVRVSKALHLGHRSGSIPFSYLGNTGQPIGYAIDLCKHLAAAIAKEIRQPEMQIVWIPIGPNERNSALMDGLIDLDCGDSTVTAQSQKVIAFSIPIYLAGTRLLVPKAASIAEIGTLSGMKVVTTTQSGNEAMLRHVLGQTGVTADVVVARTAKAATEVLTTGQAQALFADDATLFGIRNLTKDQAQFTTLPKTYSLRPKALAYRKDDERLRTLVTREIKTLIASGLIQRAHEQWFNSPLPDSVVDLKTPISYLLRDTWKTPTDVYTDYAYGHLPD

SEQ ID NO: 35978 - protein, 371 aa, Polaromonas sp. JS666
MLIGVPAEITAGETRVAITPETAKKLKAQGHTVRVQSGAGVAASVPDDAYTAVGVEITDAAGAYAADIVLKVRCPVDGEMAHAKAGGVLVGMLNPFDATGLQRLAAAGLTSFALEAAPRTSRAQSMDVLSSQANIAGYKAVMMAAEQYQRFFPMLMTAAGTVKAARVVILGVGVAGLQAIATAKRLGAVIEASDVRPSVKEQVESLGAKFIDVPYETDEEREAAVGVGGYAKPMPPSWLERQKAEVAKRVAQADVVITTALIPGRPAPVLVTEEMVKAMKPGSVIVDLAAPQGGNCPLTEPGQTVIKHGVTLVGQTNVPALVAADASALYARNLIDFLKLIITKEGALNVDLEDDIVAACLMTQGGEVKRK

SEQ ID NO: 35979 - protein, 309 aa, Polaromonas sp. JS666
MTSQPLKIGFIGLGIMGAPMAGHLINAGHQLFVFSQAKLPASIANSNATQCLNARGVAERADVIIVMVPDTPDVEAVLFGETGVASGLAMPPHASDAPRKTVVDMSSISPIATKTFAQKINALGCDYLDAPVSGGEVGAKNATLSIMVGGDEAVFGRIKPLFDLMGKNITLVGGNGDGQTAKVANQIIVALNIEAVAEALLFAARAGADPARVRQALMGGFASSKILEVHGERMVKRTFDPGFRIELHQKDLNLALSSARALGVSLPNTATAQELFNSCVAHGGKAWDHSAMVRALEKLANFEIGQKAE

SEQ ID NO: 35980 - protein, 304 aa, Polaromonas sp. JS666
MTRRIRLIGAPTDIGASTRGSSMGPEALRVAGLQATLEGHGLTVADQGNLVGPANPWQASVNGYRHLAEVAAWNRSVHEAVHTALSENDMPILLGGDHCLAIGSISAVARHCRKTGQNLRVLWLDAHADFNTNDLTPTGNTHGMPVAVLCGHGPAELTGIGGVVPAIQPSAVRQIGIRSVDQGEKRFVRELGLEVFDMRYIDEMGMRHTMQAALAGMDDNTHLHVSFDVDFLDASFAPGVGTAVKGGPTYREAQLCMEMIADTGRLASLDVMELNPALDVRNGTAEVALDLMESLFGKSTLMRR

SEQ ID NO: 35981 - protein, 230 aa, Polaromonas sp. JS666
MHELTIPKNYPVSKNQAAASPSALSSLAPEGASGADGRRIQTRRSGVHGKGVFALQDLAEGETLIEYVGEVVTWKEALRRHPHDPKDPNHTFYFHIDEKHVIDAKYGGNSSRWINHSCKPNCEADEDEGRVFIKALRNIKAGEELFYDYGLIIDAKYTKKLKAEYPCWCGAKNCRGTLLAPKDKDNGKNAAKDKPKAKDKASDRADGKAKAKTKLDSKKSQAKKNKKKKD

SEQ ID NO: 35982 - protein, 772 aa, Polaromonas sp. JS666
MPTPTAATPDNRDEKRAELRRAALEYHEFPTPGKLAIAATKQLTNQRDLALAYSPGVAAPCEEIVKDPNAAFKYTSRGNLVAVVTNGTAVLGLGDIGPLASKPVMEGKAVLFKKFAGVDVFDIEIDEKDPAKLVDIIAALEPTFGAINLEDIKAPDCFYVERELRKRMKIPVFHDDQHGTAITVGAAVLNALKVVGKDLKQVKLVTSGAGAAALACLGLLIKLGIPRENIYVTDLAGVVYEGRTELMDEDKIQFAQKTSARTLGEIIEGADIFLGLSAGGVLKKEMVKKMAAKPIILALANPNPEISPEDVKSVRDDAIMATGRTDYPNQVNNVLCFPYIFRGALDAGASTITIEMEIAAVHAIAELAQAEQSEVVAAAYVGEKLTFGPDYLIPKPFDPRLMMKIAPAVAKAAADSGVALRPIQDMTAYREKLQSFVYASGTVMKPIFASAKTAARKRVAYAEGEEERVLRACQIVVDENLARPTLIGRPAIIAQRIEKFGLRLKQDLDYDVVNVEQDHRYRDFWQTYHRMMERRGVTVQMAKIEMRRRLTLIAGMLLHKGDVDGLICGTWGTTAHHLDYLDQVIGKREGVCTYACMNGLLLPGRQVFLLDTHVNYDPTAEQLAEITTMAAEEMVRFGIKPKAALLSHSNFGSSSQPSALKMRRTLELLRDKAPWLEVDGEMHGDMALDADTRGVIMPNSTLTGEANLLVLPNIDAANIAYNLLKTAAGGNITIGPVLLGANKPMHILTPTATVRRIVNMTALTVADANAAR

SEQ ID NO: 35983 - protein, 698 aa, Polaromonas sp. JS666
MLKPMAGDPEKHQEAPTRTRVERLFGDWVRQVSPVTLRADAMAGLLGAVLVLPQGIAFATLAGLPPEYGLYTAVIPCIIAALFGSSWHVMSGPTNANSLALFAMLSPLAMAFSPQYIQLALAITVMVGVMQWLIGALRLGVLANFISPATLFGFTSGAALLIAVHALPDLLGLPAAPEHSAAAVLRHVFTQLYLVQPVALAVGAITIGVALLLRRLRRSWPHMLIGLVVATALAWLWSHFLNAGSATPSFALRTVGQIPVPWPRFELPRISWAQATDLVGLAFALTIVALGQAISIAKTVALRSGQRIDANREFRGQGLSNIVGGFFSCYVSCGSMNRSMPNLQAGARTPLASVFSALLLLVLVAVSAPLLALIPMAALAGLLVLVAVALLDFARWRQLFSLSRSDFAVALATMVATVTIRLEIAILLGMILSLMSFLYRTSRPAMRTMGFDSRGLDRQFVVIDSTPDAGLETEMTLPQKADDDSERREGPPQASSAPFPRERGSATPKAREATSVGASERSAGPPQASSAPSGGSVVREATSVGATFLPECPQLKLLRMEGEVYFGATQHVADILHALRHQPQPQKHLLVMGKSMNFIDLAGAELWEAELAARRAMGGDLYFHRPRPEVIRMWRKTGFTRVLGPEHQFPDKFTAIATIFNKLDPAICRRCTARIFWECQSVPGPDTDTDTDTDTHPV

SEQ ID NO: 35984 - protein, 400 aa, Polaromonas sp. JS666
MEALKQGSDALFILLGGIMVLAMHAGFAFLELGTVRKKNQVNALVKILVDFSVSTVVYFVVGYAVAYGTHFFVGAEQLAAKNGYELVKFFFLLTFAAAIPAIISGGIAERARFYPQLIATAVIVGLVYPFFEGIAWNQHFGVQAWIKSLTGAEFHDFAGSIVVHAVGGWLALPAVILLGARSNRYRKDGAVSAHPPSNIPFLALGAWILTVGWFGFNVMSAQTIDKISGLVAVNSLMAMVGGTLAALVFGKNDPGFVHNGPLAGLVAVCAGSDLMHPLGALVVGGVAGGVFVVMFTLTQNKWKIDDVLGVWPLHGLCGAWGGIAAGIFGSRALGGLGGVSLGAQLIGSAMGVAWALLAGFVVYGTLKATLGLRLSQEEEFEGADLSIHRIGATPDREVNW

SEQ ID NO: 35985 - protein, 335 aa, Polaromonas sp. JS666
MVSLPSSFDAVNFNAGQALALARKTFEIEAAAVQGLAGRVGPEFARAVELMLTCRGRVVVMGMGKSGHIGRKIAATLASTGTPAMFVHPAEASHGDLGMITGLDVVLAISNSGESEELTSILPVLSRQGVPLVAITGGLQSALAKQARVTLDSSVAQEACPLNLAPTASTTAQLALGDALAVALLDARGFREEDFARSHPGGALGRKLLTHVSDVMRSGDAVPKVGPDTSFTELMREMSAKGLGASAVVDAQQRVLGIFTDGDLRRLVEKGVDLRSSRAGDVMHAHPRTVRPDALAVEAVELMEQFSITSVLVVDDAGVLCGALNTNDLMRAKVI

SEQ ID NO: 35986 - protein, 580 aa, Polaromonas sp. JS666
MNDIRRTILWVIFGFSMVLLWDQWQVYNGQKATFFPATTQSAKAPAAATSAPAASASSVPVSPSTASAVPAVPGSAPGAAPGAVPAGAPSPAAAATRERVVVNTDVLALTFDSEGGTLVHSAFTRFKDMANTDAGFVLLDESTNRVYVAQTGLIASGTGGTFPTHKTLMTVVPGERSLKDGQNELQVKFESADLGGVKLVKTYTLKRGSYDIAVRHDVINTGSAPVAPQLYMQLVRDGNKPPGESSFYSTFTGPAIYTEAKKYQKVEFKDIENNKVDVEKQATNGYVAMVQHYFAAAWILADGLKRDLFLRKVDANLYAVGLITPLDSIAPGATKTIDSRLFVGPQEEKKLEALAPGLELVKDYGWLTILAKPLYWLLDKLHGFLLNWGWSIVALVLLLKIAFYWLNAKAYASMAKMKAINPKIMEMRERLKDKPQEMQQAMMKIYREEKVNPMGGCFPIMVQIPVFIALYWVLLSSVEMRNAPWVLWIHDLSAPDPFFILPVLMTLTTMLQTALNPAPPDPMQAKLMWFMPLIFSVMFFFFPAGLVLYWITNNILSIAQQWVINTRMGVPPQFNLPKFR

SEQ ID NO: 35987 - protein, 325 aa, Polaromonas sp. JS666
MMSALAQPLPYRVVAIDDGYAGYDQEIRLLGEAQASFELRPCRGSEEAAILAVRGADVVLVRESSVSRRVIDAMDRCKAVIRYGIGVDNIDMAAAAARRIAVANVPDYGTDEVSTQTVALALAVVRQVVSHDREVRSGRWSTGVIKPMYRLRGRTLGLIGYGRIARMTHEKFSGFGFGRVLVNDPCPELPDGVQAADVDDICREADIISLHAPLTAQTRHIIDARRLGLMRPTAIVVNTSRGGLIDLDALYRALSEGRILGAGLDVFETEPPDPAHPLFALTNVAVTNHIGWYSEEAMRELQLKTTQEAARVLRGEAPRNWLNRW

SEQ ID NO: 35988 - protein, 323 aa, Polaromonas sp. JS666
MSTHPIQKAFLCRRFTPAIEAELRQRFDLEVNLEDTVLTPSGIASRAHGAEVLFVTATEAITAEVIRKLQPGLKTIATLSVGYDHIDMAAARSLGIKVLHTPDVLSDACAEIAMLLVLNACRRGYEADRMVRSGSWPGWGPTQLLGMGLTGRRLGIFGMGRIGRAIATRARGFGLAIHYHNRTRLSHALEEGAIYHDTLDSLLGASDIFLIAAPGRPELKGFLDHDRIAKIPEGAVVINISRGDLINDDALIEALRSKHLFAAGLDVFANEPAIDPRYRSLDNIFLTPHIGSATHETRDAMGWLLIQGIEALNQSDVPDNLIS

SEQ ID NO: 35989 - protein, 334 aa, Polaromonas sp. JS666
MMNRQPMVRPTILLTDRIHPDAHARLALEANVVVLPDGLSREESDAALRTLLPGVQGLVVRRQLPDNLFDTPAPLCGVVRHGVGLDFIPVAQASARQIPVANTPAVNANAVAEYVFAAMFAMSRQLAFFDQEVRQGNWQSRQTAGAKTADLRGRTLGVIGYGAIGRRIGEIASQGFSMKVVAHTTTPSRLPADVEALSLEALFAASDFLVLACPLTPQTLGMIDRRVIAFAKPGAVLINVARGPVICEDDLACALTAGTISGAVLDVFEVQPLPVDSSLRKHPRVLLTPHLAGITQDAERAMGMLAVATMLALLRGERPDNVVNQEIYPKFKKA

SEQ ID NO: 35990 - protein, 609 aa, Lotus japonicus
MLRALALRRSLLRVHHHNTCTPSNSHTLRTLPTATSTSFLRRFSSSPEPPSSAAAASSSVDAETRKYLGYAALFVFCGAATYFTFPLPDDAKHKKAQIFRYAPLPEDLHTVSNWSGTHEVQTRHFHQPDSLDQLQRVVAEAHNSKTRIRPVGSGLSPNGIGLSRSGMVNLGLMDKILDVDKQKKTVTVQAGIRVQQLVDGIKDYGLTLQNFASIREQQIGGIIQVGAHGTGARLPPIDEQVIAMKLVTPAKGTIELSKEKDPELFYLARCGLGGLGVVAEVTLQCVDRQELVEHTIVSSMDEIKKNHKKLLSENKHVKYLHIPYTDSVVVVRCNPVSKWKGPPKFKPKYTKDEAIQHVRDLYKESLQKYRVEGSRVKSTDDGEQNIDELSFTELRDKLIALDPLNKNHIIKVNQAEAEFWKKSEGYRVGWSDEILGFDCGGQQWVSETCFPAGKLAKPSMKDLEYIEELKQVIEKEEIPAPAPIEQRWTSSSRSPLSPASSPSEDDIFSWVGIIMYLPTMDARQRKDITEEFFHYRHLSQAKLWDHYSAYEHWAKVEVPKDKEELAALQGRLRKRFPVDAYNKARKELDPNRVLSNNMLEKLFLQSETI

SEQ ID NO: 35991 - protein, 117 aa, Arachis hypogaea
SKPANKLENSGISLADVVEKDVKENPVMLYMKGVPDFPQCGFSSLAVRVLKQYDVPISARNILEDPELKSAVKAFSHWPTFPQVFIKGEFIGGSDIILNMHQNGELKEKLKDITSKK

SEQ ID NO: 35992 - protein, 265 aa, Avena fatua
APAHAAHAQAAQALPQPPVQPPAVNGGGIAENDRQGTLGEMTLEQFLVKAGVVRGSLGGGQAPPMPVGMVHGPMHPMQQGQHQQPGPLMYQVAPVNAMYPGMGDGMGFVPNGYTGMAVVPPPAPSQGGVGIVSPGSSDGRSAMTQADAMNCIGSGAMVMENGAARKRPAPEDRPGEKSVERRHRRMIKSRESAARSRARKQAYTVELEAELNKLKEENARLKAEETTILLAKKQMLLEKMMEQSKENAKAKKGGARPRRSGSCIW

SEQ ID NO: 35993 - protein, 272 aa, Avena fatua
VWAEINKEAPAHAAHAQAAQALPQPPVRPPAVNGGGIAENDRQGTLGEMTLEQFLVKAGVVRGSLGGGQAPPPMPVGMVHGPMHPMQQGQQPGPLMYQVAPVNAMYPGMGDGMGFVPNGYTGIAVVPPPAPSQGGVGIVSPGSSDGRSAMTQADAMNCIGSGAMVVENGAARKRPAPEDRPGEKSVERRHRRMIKNRESAARSRARKQAYTVELEAELNELKEENARLKAEETTILLARKQMLLEKMMEQSKENAKAKKGGARPRRCGSCIW

SEQ ID NO: 35994 - protein, 264 aa, Avena fatua
PAHAAHAQAAQALPQPPVQPPAVNGGGIAENDRQGTLGEMTLEQFLVKAGVVRGSLGGGQAPPMPVGMVHGPIHPMQQGQHQQPGPLMYQVAPVNAMYPGMGDGMGFVPNGYTGMAVVPPPAPSQGGVGIVSPGSSDGRSAMTQADAMNCIGSGAMVMENGAARKRPAPEDRPGERSVERRHRRMIKNRESAARSRARKQAYTVELEAELNELKEENARLKAEETTILLAKKQMLLEKMMEQSKENAKAKKGGARPRRSGSCIW

SEQ ID NO: 35995 - protein, 266 aa, Avena fatua
EAPAHAAHAQAAQALPQPPVQPPAVNGGGIAENDRQGTLGEMTLEQFLVKAGVVRGSLGGGQAPPMPVGMVHGPMHPMQQGQHQQPGPLMYQVAPVNAMYPGMGDGMGFVPNGYTGMAVVPPPAPSQGGVGIVSPGSSDGRSAMTQADAMNCIGSGAMVMENGAARKRPAPEDRPGEKSVERRHRRMIKNRESAARSRARKQAYTVELEAELNELKEENARLKAEETTILLAKKQMLLEKMMEQSKENAKAKKGGARPRRSGSCIW

SEQ ID NO: 35996 - protein, 273 aa, Avena fatua
VWAEINKEAPAHAAHAQAAQALPQPPVQPPAVNGGGIAENDRQGTLGEMTLEQFLVKAGVVRGSLGGGQAPPMPVGMVHGPMHPMQQGQHQQPGPLMYQVAPVNAMYPGMGDGMGLVPNGYTGMAVVPPPAPSQGGVGIVSPGSSDGRSAMTQADAMNCIGSGAMVMENGAARKRPAPEDRPGEKSVERRHRRMIKNRESAARSRARKQAYTVELEAELNELKEENARLKAEETTILLAKKQMLLEKMMEQSKENAKAKKGGARPRRSGSCIW

SEQ ID NO: 35997 - protein, 625 aa, Isatis tinctoria
MGNTCVGPSRNGFLQSVSAAMWRPRDADDSVSQSNGDTASEAVSGELRSPSSDQVQNKPPEQLTMPKPGTNIEIKAKSDVEIQPEIKLETQEVTKPESKPETKSETKPETKSETKPETKSETKPETKADTPAKPKKPKHMKRVSSAGLRTESVLQRKTENFKEFYSLGRKLGQGQFGTTFLCVEKTSGKEFACKSIAKRKLLTDEDVEDVRREIQIMHHLAGHPNVISIKGAYEDVLAVHLVMECCAGGELFDRIIQRGHYTERKAAELTRTIVGVVEACHSLGVMHRDLKPENFLFVSKHEDSLLKTIDFGLSMFFKPDDVFTDVVGSPYYVAPEVLRKHYGPEADVWSAGVIVYILLSGVPPFWAESEQGIFEQVLHGDLDFSSDPWPSISESAKDLVRKMLVRDPKRRLTAHQVLCHPWVQIDGVAPDKPLDSAVLSRMKQFSAMNKFKKMALRVIAESLSEEEIAGLKEMFNMIDADKSGQITFEELKAGLKRVGANLKESEILDLMQAADVDNSGTIDYKEFIAATLHLNKIEREDHLFAAFTYFDKDGSGYITPDELQQACEEFGVEDVRIEEMMRDVDQDNDGRIDYNEFVAMMQKGSITGVPVKMGLEKSFSIALKL

SEQ ID NO: 35998 - protein, 477 aa, Thiobacillus thioparus
MKKYIEEVPTGPRALVHVDGCSCGTCGQARSIDPRLQQLKPDNPDIADGMEDPHLALNYDPLFSDVLGTGVSRRDMLKMAGLAGMGAMGGMMSSMSAFAQQKRATGRRVTKAFDPVIQIGYLPITDAATLLVAHEMGFFKKQGIESKPPTLVRGWSQLVEGFSSQRFNLAHMLIPVPIYMRYNNKFPVKITAWNHTNGSGVIVSKKKGIKTVKDLGGKQYAVPYWYSIHNIIAQKMVRQAGLIPVIRPQNAKLAPNEVNFLVLNPPDMPPALAAGQIDAYCVAEPFNALGEIRAGGEMLRFTGDVWKGHPCCVVIMHEDDAMDPARAQWMQGVHNAIVEAQLHLRDNTKAMAEMMSRDGKKYMPFPKEVIERAMLFYNVADYSTPPAIQHPEWGQHRINFQGWPFPSATREVVSDMKETLVGGDLAFLNKLTPEFVAKDLVQYTYIKKALEANPKWRTDLSVPQTGDPFERKEVIEL

SEQ ID NO: 35999 - protein, 509 aa, Cucumis sativus
MAKKDDSATRPPLQRPTITLPPRPSMEAFFTGVPTGVSPGPMTLLSSYLADFADGAVDSPSFSQLLAGAMASPMAMGFFGTGSTPNYYAKDGPASELEFGMKQSKPVNLVVARSPLFSVPPGLSPSGLLNSPGFYPPQSPFGMSHQQALAQVTAQAALANSHMHMQQAEYQHSSVPAPTEPLVRDPSFSLDDASQLAIIPSTSDTKSLIAESTEVSHSDRKYQPPPPPHGSDKPADDGYNWRKYGQKLVKGSEFPRSYYKCTHLNCPRKKKIEGLPDGEITEIIYKGQHNHEPPPANKRARDNIEPAGCTNSLIKPECGLQNQAGILNKSSENVQLGSSDSEGRADTEITDDRDEDEPNPKRQNIDAGTSGVALSHKTLTEPKIIVQTRSEVDLLDDGYRWRKYGQKVVKGNPNPRSYYKCTSAGCNVRKHVERSSTDSKAVVTTYEGKHNHDVPAARNSSHHTVNNTVHHIKPLKVVAQKHPLLKEMEFGTNDQRPAVLQLKEEQITV

SEQ ID NO: 36000 - protein, 197 aa, Mesorhizobium ciceri subsp. biserrulae
EFAEFPELEQLPLWGFDGSSTQQAEGHSSDCVLKPVAVYPDPARTNGVLVMCEVMMPDGVTPHASNKRATILDDEGAWFGFEQEYFFYKDGRPLGFPESGYPAPQGPYYTGVGYSNVGSVARQIVEEHLDLCLAAGINHEGINAEVAKGQWEFQIFGKGSKKAADQMWMARYLLQRLTEKYGIDIEYHCKPLGDTDW

SEQ ID NO: 36001 - protein, 198 aa, Mesorhizobium sp. WSM1283
EFAEFPELEQLPLWGFDGSSTQQAEGHSSDCVLKPVAVYPDPARTNGVLVMCEVMMPDGVTPHASNKRATILDDEGAWFGFEQEYFFYKDGRPLGFPESGYPAPQGPYYTGVGYSNVGSVARQIVEEHLDLCLAAGINHEGINAEVAKGQWEFQIFGKGSKKAADQMWMARYLLQRLTEKYGIDIEYHCKPLGDTDWN

SEQ ID NO: 36002 - protein, 196 aa, Mesorhizobium sp. WSM2073
FAEFPTLEQLPLWGFDGSSTQQAEGHSSDCVLKPVAVYPDPARTNGVLVMCEVMMPDGVTPHASNKRATILDDEGAWFGFEQEYFFYKDGRPLGFPESGYPAPQGPYYTGVGYSNVGSVARQIVEEHLDLCLAAGINHEGINAEVAKGQWEFQIFGKGSKKAADQMWMARYLMQRLTEKYGIDIEYHCKPLGDTDW

SEQ ID NO: 36003 - protein, 197 aa, Mesorhizobium sp. WSM2074
EFAEFPTLEQLPLWGFDGSSTQQAEGHSSDCVLKPVAVYPDPARTNGVLVMCEVMMPDGVTPHASNKRATILDDEGAWFGFEQEYFFYKDGRPLGFPESGYPAPQGPYYTGVGYSNVGSVARQIVEEHLDLCLAAGINHEGINAEVAKGQWEFQIFGKGSKKAADQMWMARYLMQRLTEKYGIDIEYHCKPLGDTDW

SEQ ID NO: 36004 - protein, 506 aa, Arabidopsis thaliana
MHAYYAMQIDTHTHSCASDFVCNKISKDKKILMSLQRPNGNSSSSSSHKKHKTEESDEELLMVPDMEAAGSTCVLSSSADDGVNNPELDQTQNGVSTAKRRRGRNPVDKEYRSLKRVSAQQARERKKVYVSDLESRANELQNNNDQLEEKISTLTNENTMLQRSEEKNNYEEMENFGEGRRSGGGMLPLLALSAVAEYYRLPWKPPVTASLLAANTLVYLRPAFIDPVIPHISEVWFNPHLIFKHKDLKRLFLSAFYHVNEPHLVYNMMSLLWKGIKLETSMGSSEFASMVFTLIGMSQGVTLLLAKSLLLLFDYDRAYYNEYAVGFSGVLFAMKVVLNSQAEDYSSVYGILVPTKYAAWAELILVQMFVPNASFLGHLGGILAGIIYLKLKGSYSGSDPVTMAVRGVSRLVTWPLRFLNGMVRSRRRRITGRGRVGRGQTGIAGPGIWRCQSCTYDNSGWLSACEMCGSGRARGNGWSLNQGPALSSSNDLPLDELRRRRVERFS

SEQ ID NO: 36005 - protein, 637 aa, Arabidopsis thaliana
MVFKRKLDCLSVGFDFPNIPRAPRSCRRKVLNKRIDHDDDNTQICAIDLLALAGKILQESESSSASSNAFEEIKQEKVENCKTIKSESSDQGNSVSKPTYDISTEKCVVNSCFSFPDSDGVLERTPMSDYKKIHGLMDVGCENKNVNNGFEQGEATDRVGDGGLVTDTCNLEDATALGLQFPKSVCVGGDLKSPSTLDMTPNGSYARHGNHTNLGRKDDDEKFYSYHKLSNKFKSYRSPTIRRIRKSMSSKYWKQVPKDFGYSRADVGVKTLYRKRKSCYGYNAWQREIIYKRRRSPDRSSVVTSDGGLSSGSVSKLPKKGDTDLSGDRIMWFSCIFISGAVKLSIKSFRIPELFIEVPETATVGSLKRTVMEAVSVLLSGGIRVGVLMHGKKVRDERKTLSQTGISCDENLDNLGFTLEPSPSKVPLPLCSEDPAVPTDPTSLSERSAASPMLDSGIPHADDVIDSRNIVDSNLELVPYQGDISVDEPSSDSKELVPLPELEVKALAIVPLNQKPKRTELAQRRTRRPFSVTEVEALVQAVEELGTGRWRDVKLRAFEDADHRTYVDLKDKWKTLVHTASISPQQRRGEPVPQELLDRVLRAYGYWSQHQGKHQARGASKDPDMNRGGAFESGVSV

SEQ ID NO: 36006 - protein, 216 aa, Arabidopsis thaliana
MSDDEHHFEASESGASKTYPQSAGNIRKGGHIVIKNRPCKVVEVSTSKTGKHGHAKCHFVAIDIFTAKKLEDIVPSSHNCDVPHVNRVDYQLIDITEDGFVSLLTDSGGTKDDLKLPTDDGLTAQMRLGFDEGKDIVVSVMSSMGEEQICAVKEVGGGNVRYVIEYLWKHRVTQAAIVFDILTGFDITRFCIPCTKSGKTVIARKGQCFPLLRNWN

SEQ ID NO: 36007 - protein, 171 aa, Glycine max
KKLRLSKDQSIVLEESFKEHNTLNPKQKLALAKQLGLRARQVEVWFQNRRARTKLKQTEVDCEFLKRCCENLTEENRRLQKEVQELRALKLSPQFYMHMTPPTTLTMCPSCERVAFPPPLPLILPRVTITCLHLTPGPFPLAHGQALRCPPSQILDSRKQNDKIEKKDRKP

SEQ ID NO: 36008 - protein, 204 aa, Solanum tuberosum
RTSSLESPIMLLSGHQSAVYTMKFNPAGTIIASGSHDKEIFLWNVHGDCKNFMVLKGHKNAVLDVQWTTDGSTIVSASPDKTVRAWDVETGKQIKKMAEHSSFVNSCCPARRGPPLIVSGSDDGTAKLWDMRQRGAIQTFPDKFQITAVSFSDASDKICTGGIDNDVKLWDLRRCEVTMTLQGHQDTITGMQLSPDGSYLLTNA

SEQ ID NO: 36009 - protein, 710 aa, Stevia rebaudiana
MQSDSVKVSPFDLVSAAMNGKAMEKLNASESEDPTTLPALKMLVENRELLTLFTTSFAVLIGCLVFLMWRRSSSKKLVQDPVPQVIVVKKKEKESEVDDGKKKVSIFYGTQTGTAEGFAKALVEEAKVRYEKTSFKVIDLDDYAADDDEYEEKLKKESLAFFFLATYGDGEPTDNAANFYKWFTEGDDKGEWLKKLQYGVFGLGNRQYEHFNKIAIVVDDKLTEMGAKRLVPVGLGDDDQCIEDDFTAWKELVWPELDQLLRDEDDTSVTTPYTAAVLEYRVVYHDKPADSYAEDQTHTNGHVVHDAQHPSRSNVAFKKELHTSQSDRSCTHLEFDISHTGLSYETGDHVGVYSENLSEVVDEALKLLGLSPDTYFSVHADKEDGTPIGGASLPPPFPPCTLRDALTRYADVLSSPKKVALLALAAHASDPSEADRLKFLASPAGKDEYAQWIVANQRSLLEVMQSFPSAKPPLGVFFAAVAPRLQPRYYSISSSPKMSPNRIHVTCALVYETTPAGRIHRGLCSTWMKNAVPLTESPDCSQASIFVRTSNFRLPVDPKVPVIMIGPGTGLAPFRGFLQERLALKESGTELGSSIFFFGCRNRKVDFIYEDELNNFVETGALSELIVAFSREGTAKEYVQHKMSQKASDIWKLLSEGAYLYVCGDAKGMAKDVHRTLHTIVQEQGSLDSSKAELYVKNLQMSGRYLRDVW

SEQ ID NO: 36010 - protein, 480 aa, Rhodococcus opacus
MKDTAPYGTSDFVVVANRLPVDMETLDDGTTRWKRSPGGLVTALEPILHDRERGSWVGWPGVPDTKVEPIVSGGIDLYPVELSSTEVSLYYEGFSNATLWPLYHDVLVAPVFDRDWWHSYLDVNRHFAEETARTAAEGATVWVQDYQLQLVPRLLREMRPDLTIGFFLHIPFPPVELFMQLPWRKEIVEGLLGADLIGFHLPGGANNFLFLARRLLGLDTTTAGVGVRSALGRVTLDDRVVQVGAFPISVDSRQLVEQATDPAIVERAAEIRRELGTPAKILLGVDRLDYTKGIDLRLSALGELLDEGRLDPSDTVMVQLATPSRERVEHYMKMRSSIEEQVSHINGDHGQIGRPVVHYLYQPVDRSELIALFLAADVMLVTPMRDGMNLVAKEYVACRADLGGALVLSEFAGAAAELRGAYLVNPHDLDGVKNTIMAALDPEREQGRRRMSRLHRQVLDHDVHRWAQSFLGALSPVAGD

SEQ ID NO: 36011 - protein, 495 aa, Rhodococcus opacus
  misc_feature (48)..(48): Xaa can be any naturally occurring amino acid
  unsure (1)..(495): unsure at all Xaa locations
MAASSESSASSSRSTSDPVSGQADFVVVANRLPVDLERLPDGTTRWKXSPGGLVTALEPILRRNKGAWVGWAGVADAELDPVVEDDLELYPVPLSAAEIADYYEGFSNATLWPLYHDVIVKPEYNRDWWNAYVEVNRRFAEATSKAAAHGATVWIQDYQLQLVPKMLRMLRPDLTIGFFLHIPFPPVELFMQMPWRTEIIEGLLGADLIGFHLPGGAQNFLYLARKLAGQQTSRGNVGVRSKLGVVQVGFRTVRVGAFPISIDSGQLDEQSRSKSIRDRAKKIRKELGNPKHIMLGVDRLDYTKGIDVRLAALHELLDEQRIDPADTVMVQLATPSRERVDSYVQMRDDIERKVSRINGEYSEVGRPVVHYLHRPIPREELIAFFVAADVMLVTPLRDGMNLVAKEYVACRSDLGGALLLSEFTGAAAELRQAFLCNPHDLDSVKDAMKQALNQPQKDGRRHMRALRRQVLAHDVDRWARSFLDALAHGAPPARH

SEQ ID NO: 36012 - protein, 117 aa, Populus tremula x Populus tremuloides
MASKQELDAALKKAKELASSAPVVVFSKTYCGYCNRVKQLLTQVGASYKVVELDELSDGSQLQSALAHWTGRGTVPNVFIGGKQIGGCDTVVEKHQRNELLPLLQDAAATAKNPAQL

SEQ ID NO: 36013 - protein, 274 aa, Saccharomyces cerevisiae
LADGAHIGNYQIVKTLGEGSFGKVKLAYHTTTGQKVALKIINKKVLAKSDMQGRIEREISYLRLLRHPHIIKLYDVIKSKDEIIMVIEYAGNELFDYIVQRDKMSEQEARRFFQQIISAVEYCHRHKIVHRDLKPENLLLDEHLNVKIADFGLSNIMTDGNFLKTSCGSPNYAAPEVISGKLYAGPEVDVWSCGVILYVMLCRRLPFDDESIPVLFKNISNGVYTLPKFLSPGAAGLIKRMLIVNPLNRISIHEIMQDDWFKVDLPEYLLPPDL

SEQ ID NO: 36014 - protein, 353 aa, Stevia rebaudiana
MALLNDLINLNLTDSTEKIIAEYIWIGGSGMDLRSKARTLPKPESDPKKLPKWNYDGSSTGQAPGEDSEVILYPQAIFKDPFRGGNNILVICDAYTPAGEPIPTNKRHAAAKIFSHPEVEKEVPWYGIEQEYTLLQKDVNWPLGWPKGGFPGPQGPYYCGIGADKAFGRDVVDAHYKACLYAGLILAALNGEVMPGQWEFQVGPSVGISAGDEIWAARYILERITEIAGIVVSFDPKPIPGDWNGAGAHTNYSTKSMREEGGYEIIKKAIEKLGLKHKEHIAAYGEGNERRLTGHHETANINTFKWGVANRGASIRVGRDTEKEGKGYFEDRRPASNMDPYVVTSMIAETTLL

SEQ ID NO: 36015 - protein, 453 aa, Ralstonia metallidurans CH34
MPPGLPRLASLIADAPPDAQDNPEIPRFRCRQRPAACPDIANTAVKPIQKSHKLQNVCYDIRGPVLEKAKQMEEEGHKIIKLNIGNLAVFGFDAPEEIQQDMMRNLPNSAGYSDSKGIFAARKAIMHYTQEKKIQGVGLDDIYVGNGASELIVMAMNALLNSGDEMLVPAPDYPLWTAAVSLSGGTPVHYVCDEANEWMPDLDDIRRKITPNTRGIVIINPNNPTGALYSDELLKEIVAIAREHGLIIFADEIYDKVLYDGNTHTSIGSLSTDVLTVTFNGLSKNYRSCGYRAGWMVVSGDKRPALDYIEGLNMLSSMRLCANVPGQWAIQTALGGYQSINDLVTEGGRLRRQRDLAYELITKIPGVTCVKPKAALYLFPKLDLSMYPIQDDQEFIYELLQESKVLLVQGTGFNWGAPDHFRIVFLPHEEDLREAITRVGRFLESYRKRHGTA

SEQ ID NO: 36016 - protein, 861 aa, Ralstonia metallidurans CH34
MTGRGTWEETCRGNSAGDSAGKAHRHGAYCTETQRCPKQKAYCEILFHNIKCTLPKAPTAETAGSWSRPALNRQRYSVRLHRSEDAQMTSPQQSPSQDDLKQQQREALRKAALEYHEFPTPGKISVTPTKPLSNQRDLALAYSPGVAAACEEIVANQANSFRYTARGNLVAVITNGTAVLGLGDIGAAASKPVMEGKAGLFKKFAGIDVFDIEVDEKDPEKLVDIIASLEPTFGGINLEDIKAPECFYVERKLRERMKIPVFHDDQHGTAIVVGAAVINGMQVVGKDISKVKLVASGAGAAALACLDLLVDLGLPIENIWVTDLAGVVYEGRTELMDPEKARFSQKTDKRKLAEVIEGADIFLGLSAAGVLKPEMVQKMADKPLVMALANPNPEIMPELVKEVRPDAVIATGRTDYPNQVNNVLCFPFIFRGALDCGATTITREMEIAAANAVAELARQEQSDIVASAYGIQDLSFGPEYLIPKPFDPRLIVKIAPAVAEAAAKSGVASRPIEDMDAYRLQLQQFVYHSGTLMKPIYAAARKVQKEKKRIVFAEGEEERVLRAVQVIVDEKLANPILIGRPAVLAHRIERFGLRLRMGEDFTVVNPEHDERFREYSDAYYRMMAREGITPQYAKLEMRRRTTLIGAMLVEKGEADGMICGTVSTTAAHLRYIDQVIGGTNCVYAAMNGLVLPGRQIFLVDTHVNVDPTAEQLAEITIMAAEELKRFGIEPKVGLLSHSNFGTSEAPSARKMRDTLKILRDRAPDLEVDGEMHGDSALDEKLRDSLVPDSALKGEANLLVCPNIDAANISYNLLKVAAGNNVAIGPILLGVKAPVHILTPSATVRRIVNMTALVVVDAAAKV

SEQ ID NO: 36017 - protein, 215 aa, Phaseolus vulgaris
RLSYGYSSFKGKRSSMEDFFDTTISEVDGQMVAFFGVFDGHGGSRTAEYLKNNLFKNLSSHPDFIKDTKTAIVEAFKQTDIDYLNEEKGHQRDAGSTASTAMLLGDRIVVANVGDSRVVASRSGSAIPLSIDHKPDRSDERQRIEKAGGFIIWAGTWRVGGVLAVSRAFGDKLLKPYVVADPEIQEEEIDGVDFIIIASDGLWNVISNKEAVSLV

SEQ ID NO: 36018 - protein, 301 aa, Staphylococcus xylosus
MNKTVEIIGVPATFGQRKLGVNLGPDAIRYAGIEERIKAIGLSVKDSGNIAVPKLDLEKFNSEQEGLRNIEEIIETSNILSDAVSTSIEHNHFPLVLGGDHSIAIGSISGVSKHYENLGVIWYDAHGDLNVPEESPSGNIHGMPLRVLAGEGDDRLVNVSNYSPKVKPENIVLIGMRDLDEGEKRYIKEHNIKTFTMAEVDRFGIKQVIEETIAYLKPKTDGIHLSLDVDALDPVETPGTGTRVLGGLTYRESHFALELLHNSNLITSMDLVEVNPLIDHNNDTAEQAVGLVGSFFGETLL

SEQ ID NO: 36019 - protein, 183 aa, Arabidopsis thaliana
MTRVYVGNLDPRVTERELEDEFKAFGVLRNVWVARRPPGYAFLEFDDERDALDAISALDRKNGWRVELSHKDKGGRGGGGGRRGGIEDSKCYECGELGHFARECRRGRGSVRRRSPSPRRRRSPDYGYARSPRGRRSPPRRRSVTPPRRGRSYSRSPPYRGSRRDSPRRRDSPYGRRSPYANG

SEQ ID NO: 36020 - protein, 556 aa, Rhizobium leguminosarum bv. viciae
MYRYDEFDHAFVTERVEQFRDQVERRLSGELAEDAFKPLRLMNGVYLQLHAYMLRIAIPYGTLSSRQLRMLAHIARTYDRGYGHFTTRQNLQFNWPKLSDIPDALADLASVEMHALQTSGNCIRNVTADHFAGAAADEIADPRPYAEILRQWSSVHPEFSFLPRKFKIAVTGAERDRAAIQVHDIGLHVKKNDKGEIGFAVYVGGGQGRTPMIAKLIRDFLPEEDLLSYTTAIVRVYNLHGRRDNKYKARIKILVHETGTEELTRQVEAEFAALKDTELKLPEKDVQSIAAYFAPPDLPQRAEGWENLARWKKADSGFSRWVQQNVQPHKNPDYGMVTISLKPIGGIPGDASDAQMDAIADLAEEYAFDEIRVSHEQNLILPHVALADLEAVYRGLVAINLAEANAGLITDIIACPGLDYCALANARSIPLAQEISRRFGNAERQAEIGELKIKISGCINACGHHHVGHIGLLGVEKKGAELYQITLGGSGDEHTSIGEIIGRGFEPDRVTDAIETIVDTYLGLRLDHSENFLAAYRRVGPQPFKTALYGSAAEAA

SEQ ID NO: 36021 - protein, 878 aa, delta proteobacterium MLMS-1
MIGVDMKALLEKCNSYTTQALHTAAGLTVNRTHYEVTVEHLLLSCLEDQSADIPLALARFGVDSGRLKAALNDSMEDFRAGNSSRPVFSPLLMELLEAAWLVASVDLGLGRIRSGAVLLAFLRKPALYAQGGYTDQIGLINREELQKKFWELAKVSSESAGESGSAPATGAADQGGAAGAGGESFIAKFCEDFTAKAQNGKIDAVFGRDQEIRQIVDILARRRKNNPILVGEPGVGKTAVIEGLALRIIEGDVPEVLAGVTLLGLDMGLLEAGAGMKGEFERRLKGVLDEIKASEKPIILFIDEAHTLVGAGGSAGGSDAANLLKPALARGEIKTCAATTWKEYQKYFEKDPALARRFQLVKLDEPGVKTSALILRGIRDSYEKAHQVVIRDDAIEAAAEFANRYITGRFLPDKAIDLMDTACARVKVSLASKPGALEDKERAIQAAGREQKALVRDRTNGAPVDEERLGALAETITSLTSETELLRADWQNELEAARALVTARTTLNQSLGEEEEPAELRENFIKASRTYEAARVGDGLVSIEVTPDVVAKVVSDWTGIPVGKVAREQAALAVDLEKQLGVRIKGQDAALYAVSEAIKASKAGLRGPEQPGGVFLLVGPSGVGKTETGLALADILFGDEKSVVTVNMSEFQEKHTVSRLIGSPPGYVGYGEGGMLTEAVRQRPYSVVLLDEVEKAHLDVMNLFYQVFDKGMLTDGEGKLISFRNTVIMLTSNLASDVIQEMTKDGTAMELESLLGAVRPILSEHFKPALLARMSIVPFQSLSPAAMQGIAALKLDTLAARLLANNKMTMTYTPQVAELIAARCTEVETGARNIEYILSGTILPRMSQEILAHMSDAGMPRRVNLEVNEEGSFAMDFT

SEQ ID NO: 36022 - protein, 384 aa, delta proteobacterium MLMS-1
MMSKIYLDNNATTPLDAEVSAAMGECLAANFGNPSSGHTFGETARLALEEAREEVAALIAAPSSQLIFTSGGSEANCQAILSAVLARPERRKLVTSAVEHPSVLQPLRYLAAQHGYQLLELAVDEAGLLDPAALDAAVDEDTALVSLMAANNETGVLWPVAELGEICRQKGVLFHCDAVQLVGKEEIAAASWPVDYLTLAAHKLHGPKGSGVLYHAPEAPVSPLVMGAGQEGGRRAGTENVAGAVGLGRACSRAAAHLAAGGREQMLALGRRLEEGILAGCPEARINGAGAPRLANTVNVSFEHCSSAQMIQDLDERGFAVAAHAACHSGDLDPSPVLAAMAVPESYRHGTLRISLGRLNTAAEVEELLAVLPAVVAHSRQGFV

SEQ ID NO: 36023 - protein, 437 aa, delta proteobacterium MLMS-1
MRTDIVHIGAGELTYEIRNIVNVGEKLQKLGIKTYWENIGDPVAKGEEIPLWMKKVVAEYVMQDASYGYCPTRGILTTREFLAAEVNRRGGVQIGPDDILFFNGLGDAISKVYGMLRRNARVVMPSPSYTTHSSGEASHAGDRPVCYRLDPHNHWYPDLDDLEKRIKYNPAVAGILLINPDNPTGAVYPEEILRGFVALARKYDLFIICDEVYQRIVYNGRQTKALAEVIGDVPAINMRGISKEMPWPGSRCGWIEVYNADKDPMFAKYVASILNSKMVEVCSTTLPQMVLPAIITHPEYNSHLAERVKRYERASNVAYDILKEVDGLIVNRTDGAFYMSVTFEPGILHDRQSLPIENREVREHVEQLVNQPGTAPDKRFVYYLLGSTGICVVPLSSFATEIQGFRTTLLERDEDRFRRICQTMADAIRQYLASSGQ

SEQ ID NO: 36024 - protein, 573 aa, delta proteobacterium MLMS-1
MSNKEILRRLYHLVFPYRRRLLLAMACMVLVAGFGGAQAYMVKPLLDKIFFEQERALLNLLPLLLIMIFVAKGVCYYCYRYMLDTVGQKVIRDLRKSIFQHIHALPMAFFHRVSTGELISRVISDVTLIQGTVSKALVSILRDLVQVIVLLGVIFYLDWQMALVTLVLLPAAAAPIVHFARKFRRNSIRNQQTVALVSNALHETIVGQRIVKAFGMEAYESRRFSILLDRLFSIIKKEIQLSSLQNPLMEVIGGIAFAGIIWYGGSQVLAGHSTPGTFFAFLTALIMVYDPMKGISGLNSVVMQGLAASERVFQLLDEPVDIGDRSAARVLPPFKKELEFKNVSFSYDGKVPVLREINLKVSAGEVLAIVGPSGGGKSTLVNLIPRFYEISEGQILLDGNDLREVTLASLRAQIAIVEQQTVLFNDTVRNNIAYGDLQRSEEEVVAAAKAAHAHDFIQDLPDGLDTLIGEGGARLSGGQRQRISIARALLKNAPILILDEATSALDTESEREVQKALENLMADRTTLVIAHRLSTIKNADRIIVMQDGRIVEEGDHQDLLAQEGAYQLLHRQQ

SEQ ID NO: 36025 - protein, 461 aa, delta proteobacterium MLMS-1
MGRILVVDDELSMREFLKILLEEEGHGVCCAGDGEAALARLRQEDFDLLISDIRMPPPNGLELLDQARQLQPELPVVLVTAFASPDDAVLAMKNGAFDYLTKPFKVDEIKDIVSTALSSRRQLPEPTLKTNSEVPANGGFVGIIGNSPEMLKIYEVIRRVAPTQANVLIHGESGTGKELVARAIHQLSPAVQHQFVPIICSAIPESLFESELFGHAKGAFTGATTNRTGLFEQANYGTAFLDEIGELTPLTQTKLLRVLQEREIKRVGESVAIRINFRMISATNRDLEEEVAAGRFREDLFYRLAVVPIRVPPLRERKSDVPLLVEHFLAKYSRLFGKDIRKISSYALELLMNYDFPGNVRELENIIERGVAMENSQIILPESLTLTGRRHGGQPAPADDRGSLEADVFNRGLEPALTDFERQMIIKALQKAGNSKTRAAELLNTSFRSLRYKIKKYEIDS

SEQ ID NO: 36026 - protein, 448 aa, delta proteobacterium MLMS-1
MTNQATAATELDLLVVDDDRRMRELLAEIFSTRGFGVTPAADGEEALALLKERKFDLVVTDLKMPGHDGLAILRQARSDNPEMPVIMITGHGSVDSALAAMKQGAYDYIEKPFDSEQLLLVAERAAGYARLCRENRELTTTLSDLRSEELIGAGPAMSKAKELLLRVAPFDVPVLLQGETGTGKELAARLIHRHSRRHEGPFLPLNCAAVPEELLESELFGHEAGAFTGAGQRKRGLVEAADAGTLFLDEIDSMSPTFQGKMLRFLQDHTFMRVGGAEPQKADVRVIAASGRDLAAAADEGNFRSDLFYRLKGVMVTLPPLRRRGADISELAYYFLRKFNTLYQRQITAIERDALEVLLDYPWPGNVRELENVIGSAVIMAEGESITPAALPEELRSGDDAPVESLNLQAMERRLIRRALERTGGNKARAARLLGIDPATLWRKLKNR

SEQ ID NO: 36027 - protein, 559 aa, delta proteobacterium MLMS-1
MNNYRALLAIVLSMAILLVYQFFFMPPPPESTAPEPEAPVAERATAPTAAPERPRPGTTDPTGAPAPVDVSSLLAQEVEGREIVVETDLYEAVISEAGGALRSFRLKEFRETVDPDSPAKELVRTDHDNGLPLRFSWGVEPHQADLLHYQSERQGRLVVPAGREQTLTLRAQSPLGLEFIRTYTFRDSDHLLELREEVRNTGEVPLQGAPYLALTSRPFEAEDDPLKRFLFDGPVALVDGEVHEVRPRDLVEERSGRSFTGEVSWAGYHDSYFLAAIIPREQGQATAHFSANREETATTVLASAAEVLNPGEARSYEYMVYYGPKKLAELNAIGYDLGRSVNFGWFDFLARPAFYVLSFFHGMVGNYGLAIIMVTILIKILFWPLTHKGLKSMKVMQKIQPRMAKLREKFKDDKQRQQQEMLKLYQTYKVNPLGGCLPMLLQIPVFFALYKVLLQSVELRHAPFMLWINDLSAPDRLYIGFDIPWLGGIPVLTLLMAASMFIQQKMTPIADPMQARIMLFLPLVFFFLFLNFASGLVLYWFINNVLTIAQQYTIYRQKD

SEQ ID NO: 36028 - protein, 335 aa, delta proteobacterium MLMS-1
MNRRQFVKLGAQVALVGGLVPGLAACKRRGGGDRPRLRLGYLPITDHLLLLAHDYYDFQQIEIVPVKFSSWPEAAEALRAGAVDAAFLLTPLGLALRHQRAPVQAVLLGHRNGSVLTLAARDDITSPTQLAGKRIAVPSRFSTHYLLLRRLLHDAGLPPEAVEYIDMAPPEMVQALAGGRLDGFIVAEPFGAQAEMLGVGRVFTLSRDIWPGHICCVLNLQEAFSQRHPEAVRELVAGLIETGRRIEQNRRQAAERSVSYLGQSPEVIEFVLTRPPDRVTYHDLYPARADFAATQEQMARVGQRQAAAVNLDSYLEPAFAAATHNEKPLGTDGGV

SEQ ID NO: 36029 - protein, 359 aa, delta proteobacterium MLMS-1
MVETTATEQARILIADDDAMVREAVARILSVYGHGVSTAAGGEEALRRLGDELDVIILDINMPDMDGFQVLEQINKRDLGVPVIFLTGAGSMEYAVKAVNLGAYDFITKPIEDLELFNIKIKRAIEKRGFVRRERAYRENLESEVKDKTKELEEKNRLLEEYSHNLEVTTLDTMLSLQTALEEKDIYTAGHTVRVTQYAGQIAAAMGLANDEREVLARACQVHDIGKLVIDVSYICKPGPLAEEEWEMMRKHPVIGENIVKPISFMNRELGIVRHHHERLDGKGYPDGIGGNEIDLPTRIIVVADSFDAMTSKRSYRRNLSLSEAREEMRRCAGSQFCPEVVKVFCELLDSGNGLPLQH

SEQ ID NO: 36030 - protein, 286 aa, delta proteobacterium MLMS-1
MTSYGFLGLGIMGRAMATNLLKAGCEVVVWNRDPAKCEPLLALGARRGETPQAVASRCDLTFAILADPAACREVFYGKQGVQAGIGGRRGYIDMSTVDPGTSGEIAAAVAELGGRFLEAPVSGSKKPAEDGALVFLAAGDQSLFDDAAPAFEVMGKKSFYLGEVGNGARMKLVINQIMAGMLAALGEGLALGQQAELAGEEIMAVLAEGAMANPMFKLKGPAMLAGEFAANFPLKHMQKDLRLAQALGEEVNQPLPAAAAVNAIFKRACAAGHGDEDMAAIYRVVK

SEQ ID NO: 36031 - protein, 476 aa, delta proteobacterium MLMS-1
MRIGEGAVMEGRVLIIDDEASVRKGFASLLAAEGLTVTVAADGQEGLVLLQRESFDLVLLDFAMPGMDGLEVLRRIKVLEQAPMVIMITGYGEVSLVVEAIKEGAYDYLLKPPDPDHLLMTVQRALDKISLEKQVSVLDRSLASALENQLGKSAAMARVIADIKVVAASDFSLLIGGETGTGKSFAASLIHNLSARAAGPFIALDMGSIPETLLESELFGYRKGAFTGAERSKPGYFELANGGTLLLDELQNLPPRAQGKILQVAEEKKFYPLGRDKPVSVDVRLIGASNSDLGRAVEGGEFRRDLYYRLNEYSILMPPLRERPDDIAFLAARLLSAVAVELNRNLSGLSRQALALLASQPWPGNVRELKNVVRRAALLCAGGEIDTEVLRRVLTNGHDSASDPAGPADPSGLTSESGLAGSRDSGAGPPVSLEAAEKTTVGQALQHTGGNRTKTAAILGITHKTLLAKIKKYGLS

SEQ ID NO: 36032 - protein, 435 aa, delta proteobacterium MLMS-1
MKAHKLFKIFLATGLLAAWPASALAGDQGLYTANNAWMLMATFLVFVMHLGFASLEAGMTRAKNTVNILFKNTAIIAIGILTYAVIGFNLMYPGEFALGSWLGFAGFGIGTSPEELKILEDGVGVYTYWTDFIFQAMFAATAATIVSGAVAERIKLHSFLLFTAIYVALIYPWLGSWQWGGGWLDARGFYDFAGSTLVHSVGGWAALAGVIVLGPRLGKYINGKIRPIPGHNMPLATIGVFLLWLGWFGFNGGSVLSADPAMISFVFVTTALAASAGILSAMATSWAVTKKPDLTMALNGALAGLVGITAGADVVGTGSAVIIGLIAGALVVFSILILDRIKLDDPVGAISVHLTCGIWGTLAVGIFAAEFSLATQLLGVVAYGAVAFAAALVIFLMIKFSIGLRVSEEEERGGLDLSEHGMEAYSGFEMTPPSS

SEQ ID NO: 36033 - protein, 493 aa, delta proteobacterium MLMS-1
MGRKILVVDDEQNMRIALYEALSRSGHQVTLAENGRLALELIEQQPPDLVVTDIRMPEMDGIEMLQQIKARAPQLPVVIITGYATVETAVEAMKQGAVDYILKPFPVEVIDETVRKVFKQRQGEAALGSEGATPAAAVPAAASDQRTVIGRDAHFLRLLERARAVASSKATVLVLGESGTGKEVFARFIHHVSDRKAGPFVALNCAALPEGLLESELFGHEKGAFTGAVMSKKGKFEQAHGGTLLLDEIGEVPLHLQAKLLRVLQEEEVDRLGGKEPVKVDVHVLATTNRDLGAAVREGNFREDLFYRLNVIPIRLPAMRERPEDISLLADHFIEKYTARYQKPAKKLSAASRQRFLEYQWPGNVRELENLVERAVLLSAGPELEPWDFWEDELPPAGAVTGATDPELAGSANPEPVAAADLALAGSNTDAAASAAEIAIDPSRHSLWDVERQMILRALRQTSDNRTHAAKMLGISVRTLRNKLNEYRTKGVL

SEQ ID NO: 36034 - protein, 193 aa, delta proteobacterium MLMS-1
MKKAVFLDRDGVVNIDHGYVHRPKDFIFINGVFEACRHLQRGGYLLVMITNQSGIARGLFTEKDFQNLTDWMLKRFREHGVAITAVYHCPHHPEHPPPVARPCQCRKPAPGMLIQAIRELSIDPGASLMIGDKEADMQAAATAGIKRKILVRSGQQASPKAEELANEIWGSIKEALTAVTIVPVKDGHRHGHG

SEQ ID NO: 36035 - protein, 573 aa, delta proteobacterium MLMS-1
MSNKEILRRLYHLVFPYRRRLLLAMACMVLVAGFGGAQAYMVKPLLDKIFIEQESTLLHLLPLALVMVFVVKGVCYYCYRYMLDNVGQSVIRDLRKLIFQHIHALPMAFFHRVSTGELISRVISDVTLIQGTVSKALVSILRDLVQVIVLLGVIFYLDWQMALIALVLLPAAAAPIVHFARKFRRNSIRNQQTVALVSNALHETIVGQRIVKAFGMEAYESRRFSTLLDHLFSIIKKEIQLRSLQNPLMEVIGGIAFAAIIWYGGTQVLAGHSTPGTFFAFLTALIMVYDPVKGISGLNSVVMQGLAASERVFQLLDEPADIGDRPEAKVLPPFKKELEFKNVSFSYDGKIPVLREINFKVSAGEVLAIVGPSGGGKSTLVNLLPRFYEVSEGQILLDGNDLREVTLVSLRAQIAIVEQQTVLFNDTVRNNIAYGDLERSEEEVVAAAKAAHAHDFIQDLPDGLDTLIGEGGARLSGGQRQRISIARALLRNSPILILDEATSALDTESEREVQKALENLMADRTTLVIAHRLSTIKNADRIIVMDDGRIIEEGDHQTLLRREGAYQLLHRQQ

SEQ ID NO: 36036 - protein, 553 aa, delta proteobacterium MLMS-1
METGVEVIFGFPGGAVIDLYDELLRTDKLTHVLVRHEQAAIHAADAYGRVRGEVGVALVTSGPGATNTVTGIASAYCDSIPLVVFTGQVPTMLIGNDAFQEVDIVGITRPVTKHNYLVKKPEDLIPTIREAFHLARSGRPGPVLVDLPKDVIGAMVKYTEPKPIKMRTYRPTYEPHPGQIEKACKTILKAKKPVLYVGGGVINANASEELTALAKKLDIPVTMTLMGLGAFPGTDPLSMGMLGMHGTYYANMAVAHCDLLIAVGARFDDRVTGRIDAFAPHAKIIHIDIDPSSISKNVKVDIPIVADCNHALAAMNSWFNNSQEFNQEEARQRHRPWHEQIKEWKNKHPLGYIEETNVIKPQFVVQKLHELTGGNAIITTEVGQNQMWAAQFYYFNKPRHFMTSGGLGVMGYGFPAAIGAQMAAPNEVVIDVAGDGSIQMNIQELATARQYKCPVKIAILNNNYLGMVRQWQELFYDKQYAHTTLDVAPDFVKLAEAYGAVGLRATKPSEVEPVIKEALKTNNTVLMDFVISREEGVYPMVPAGKATTEMLLV

SEQ ID NO: 36037 - protein, 231 aa, delta proteobacterium MLMS-1
RRITAVMPYYGYSRQDRKVAPRVPITAKVVAEMLMVVGVRRVLTMDLHAGQIQGFFNIPVDNLYAAPVLLDYMHRDLDVSRVVMVSPDAGGVERCRAYAKRLNTTLAIVDKRREKANECEAMSVIGDVKGKIAVMLDDMVDTAGTLCSAAKVLKESGASEVIACCSHGVLSGPAIERLEKSQISQLVITDSVPLRGAARECAKIKVLSVSKLLAEAIRRIHSEDSVSSLFV

SEQ ID NO: 36038 - protein, 70 aa, delta proteobacterium MLMS-1
MSERVNGKVKWFNAPKGFGFIERENDSDVFVHYRGIKGDGYRSLQDGQEVIFSVVETPKGLQAEEVEVIG

SEQ ID NO: 36039 - protein, 286 aa, delta proteobacterium MLMS-1
MTSYGFLGLGIMGRAMATNLLKAGCEVVVWNRDPAKCEPLLALGARRGETPQAVASRCDLTFAILADPAACREVFYGKQGVQAGIGGRRGYIDMSTVDPGTSGEIAAAVAELGGRFLEAPVSGSKKPAEDGALVFLAAGDQSLFDDAAPAFEVMGKKSFYLGEVGNGARMKLVINQIMAGMLAALGEGLALGQQAELAGEEIMAVLAEGAMANPMFKLKGPAMLAGEFAANFPLKHMQKDLRLAQALGEEVNQPLPAAAAVNAIFKRACTAGHGDEDMAAIYRVVK

SEQ ID NO: 36040 - protein, 359 aa, delta proteobacterium MLMS-1
MVETTATEQARILIADDDAMVREAVARILSVYGHGVSTAAGGEEALRRLGDELDVIILDINMPDMDGFQVLEQINKRDLGVPVIFLTGAGSMEYAVKAVNLGAYDFITKPIEDLELFNIKIKRAIEKRGFVRRERAYRENLESEVKDKTKELEEKNRLLEEYSHNLEVTTLDTMLSLQTALEEKDIYTAGHTVRVTQYAGQIAAAMGLANGEREVLARACQVHDIGKLVIDVSYICKPGPLAEEEWEMMRKHPVIGENIVKPISFMNRELGIVRHHHERLDGKGYPDGIGGNEIDLPTRIIVVADSFDAMTSKRSYRRNLSLSEAREEMRRCAGSQFCPEVVKVFCELLASGNGLPLQH

SEQ ID NO: 36041 - protein, 436 aa, delta proteobacterium MLMS-1
MRYLRSTFWIGLYFIVAAAPVLAMLIEPPPGRGFWREFGVAIGFAGLSMMGLQFFITGRFKNLTAPYGIDVVYHFHRHISLIAFIFILIHVVVLLVASPDLLLLLHPASAPWWMVVGVIGLLAFVVVIISSLYRRPLGLNYELWRFIHGNVSLAAVVLSVAHVVGVGFYTETPVKLGLWLVMVAAWGLALVYVRVFKSFTSWRRPYIVEEVRPEPGRSWTLRLRPEGHDGMEFKSGQFAWLTLGKSPFAIREHPFSFSSSAMERGWLEMTIKELGDFTSQIGQTAPGTRAYLDGPYGSFIMEESGAPGFCFIAGGVGISPIMSMLRAMADRHDQRPVVLFYGSKDWDNATFREELEALKQRLNLRVVHVLGNPPPQWQGEKGMITAELMARYLPENRMRLEYFICGPVPMQNFMRKVVDRLGLPPENIHSESFNFV

SEQ ID NO: 36042 - protein, 665 aa, delta proteobacterium MLMS-1
MSESPIESGTNARIRINPPVFIISAVLTVLLVGFAAIATETAALVFNATQSWVTESAGWFYVLAVAGFLVFIIGLAISNFGLVKLGSDHSEPDYSYLSWFAMLFSAGMGIGLMFFGVAEPVMHYVSPPVGDPETAEAARQAMRITFFHWGIHAWAIYAVVAISLAYFAFRQGLPLTIRSSLYPLIGERIYGPIGHTVDIFAVLGTIFGVATSLGLGVVQINSGLDYLFGIPSTAVTQVILIAVITGFATISVVLGLDGGIRRISELNIILACSLLLFVLVFGPTIFLLQTLVQNTGMYISSVFEMTFNLYAYEPTDWIGGWTLFYWGWWIAWAPFVGMFIARVSKGRTIREFVVGVLLVPVGFTFMWMTFFGDTALHMLMVQGISALSEAVAADTSVALFQFFEQLPFSTITALVATLLVVTFFVTSSDSGSLVVDILTSGGHAEPSPVWQRIFWAVVEGIVAATLLLAGGLAALQTATIASALPFTVIMIVMCWGLLRALRIEGFKQVSLREARVMPRGPHAALNWRKRLRTLLHHPGKREVLEYLETVVKPALEEVAEELAKQQIEARTGQGEDGRVWVEVLQGEEIDFYYSVRPRAYEPPALVMRDTRADRVEALKYYRAEVHLQEGGQDYDIMNWGRDYVISDVLEQYERHLHFLKAVRHQ

SEQ ID NO: 36043 - protein, 507 aa, delta proteobacterium MLMS-1
MNTLIKKNIVFLVSLGIALAVIIMGIGKPELLDEISAWLHTGIIDNFGWSYLLGSLFFLVFSIGLAVSRFGDLKLGQDHEKPQYGYFGWFSMLFAAGMGIGLIFWGVAEPLSHYAQPPGYLEPQSGEAAAFAMRHSFFHWGLHPWAIYIIMSLAVAYFSFRRGMPPLISSCFYPLLGERINGPIGYLIDILSVLATIFGIVTSLGLGAIQITSGLATISPLPDVFATTLGVIAVVTVLFLISSLTGLDKGIQMLSKANIILALLLLTFMLIVGPTVYILSIFTTTIGQYFANLLEMSLASNPFEGYQWTKSWTMFYWAWWISWAPFVGLFVASISRGRTIREFILGAMLVPTLLTFVWFSVFGGAGLHLQIVGQVDISGQVAENVSVALFQLFEHYPLSNLLTLITVLLLMVFFITSADSATYVLAMMTSNGELRPSNWKKIIWGVTVSTTACILLFTGGLEALQRMAITAALPFAIIMLLLCYCLWLGMSYELDQRPPTQPPERQD

SEQ ID NO: 36044 - protein, 406 aa, delta proteobacterium MLMS-1
MALIVQKFGGTSVADPERIRAVARRVLKEQQAGNRMVVVLSAMAGETNRFVDLAQQMQSLPDPREMDVLLATGEQVTVALFAMAIKELGHDAVSLLGDQVKIHTDGMHTRARILSIDHELINSHLDQGRVVVVAGFQGVTADGELTTLGRGGSDTTAVALAAALQADQCEIFTDVDGVYTTDPNICASACKIDRIAYEEMLELASLGAKVLDIRSVSIAKQHRVPVQVRSTFTDTEGTWVVEEDKQMESNPVSGVTYNRNEARITVSKLPDIPGVASRLFTPVAEEGVVVDMIIQNTRDGNLTDLTFTVPKSDYQRALKVIEKTAAEIGAEGVSGSENISKVSIVGVGMRNHFGIATTMFEVLSREGINIQMISTSEIKISCVIEEKYTELAVRALHEAFGLSGQE

SEQ ID NO: 36045 - protein, 295 aa, delta proteobacterium MLMS-1
MQTEVSYPSFLGDEAVVAGADRIAVLSAPLANTVSWGGGTEHGPAAILEASLALEVFDDELLQETVQAGIVTRPPLALAGLDSATACRLVDEAVSVELAAGLFPVLLGGEHTVSGPAALAMQRYYPALHVVQVDAHLDLRREYDGTPLSHACVMRRIAEAGMAFSQVGIRSFAAEEWQLVQQRGWQPFTMARIRSREDWLEQLLAEIKGPVYLTVDVDGLDPAIMPATGTPEPDGLYWPQLIALARALATGPGLVGLDVVELAPKPGLAHAAFTAAKFIYRTLGYAFPTSVHQGR

SEQ ID NO: 36046 - protein, 583 aa, delta proteobacterium MLMS-1
MCTIVVTYNEAQPEVLRAMAKAVHHRGPDSLEICCHGNHGVAACRLTILGDPKAPMIYHDPHSGRIILLNGEIYNYSELWQELNKVGIVAGTDLEAELISRLYSVHGPQFAQRLKGMFAIAILDEANLVLIRDRFGIKPLYFTRHGQRILVSSEIKGILAHPGITPILNHSSFQETRVFGYVSSPEQTFFENIQQVQPGQVLVFNAAGREHATTFGAIPKAHFVNGQPEPDYEESVVITRETILKAVERMFGHGEMDKGVFLSGGIDSSTIALVASLHSGRKLQTFTLADSNETPDLLAARQVAEALKTDHHEYIVTSDDYWRWLPDYVAHYEGLMAGGVFHIQGGLAFHILAQYISKHVKVAFSGEGADELFGGYYWIHTHPLGFSDRIRKNLTAVKGNAALTATVNTLFPPPEDATVYQKNLFDFLLKGGLSNYHLQSVDRSAGAFGMEIRPFYLDDDLSQWAASLPIEYKVPNKQTTKRILRDAFRQDFQKLGLETVLTRQKMGMPSALANLDKEINEKVERAVTAEDLAGHPYGAILGSKMNLLLFDLFEHIFFKGWNHHSALPPSDSYLARVWPTYST

SEQ ID NO: 36047 - protein, 425 aa, delta proteobacterium MLMS-1
MSKLVPPHGGKGLVCSKLHGKELVAEQDKAKGLKQIEISGRTKGDLIMMGIGAFSPLNGFMGKADWKSVCEKYALADGTFWPIPITFDVAKADADEIKEGDEIALVRDGETYATMKVNEKYIMDESAKKWECEKVFKGKGEESADDKFWEIALEDHPGVQMVMAQKEVNLAGPVKVLSEGDYPDKYKGVYLTPAETRAIFDERGWKDVAALQLRNPMHRSHEYLAKIAVEVCDGVLIHSLVGNLKPGDIPAEVRVKAIDTLVDKYFVKDNVVQAGYPMDMRYAGPREALLHATFRQNYGVNNMLIGRDHAGVGDFYGLFEAQEIFEEIPSFEPGKGLLCKPLKIDWTFYCYKCDGMASLRTCPHGKEDRVILSGTKLRKALSEGEEIVDHFGREEVLDILRAYYQGLTEKVEVKMQGAASGDTMK

SEQ ID NO: 36048 - protein, 215 aa, delta proteobacterium MLMS-1
MKFFIDTANVEEISQAVDMGMVDGVTTNPSLVARENKPFEALLREITELVDGPISAEVISSETDGMVEEGRQLAALHSNIVVKIPMTVAGLRAVKQLAQDNIKTNVTLVFSSSQALMAAKAGAAFVSPFVGRLDDISENGLDLVRDILEIYDNYGYPTEVIVASVRHPIHVVESALLGAHIATIPFKVISQLASHPLTDIGMEKFLSDWAKRPRK

SEQ ID NO: 36049 - protein, 403 aa, delta proteobacterium MLMS-1
MLPKVNKIVLAYSGGLDTSVILRWLKETCQCPVIAYAADIGQTEDWEAVRAKGLATGADEVVIADLKEEFVRDYVFPAFRANAIYEGSYLLGTSLARPVIAKEQVRLAEVHGADAVSHGATGKGNDQVRFELGYMALNPDLQIIAPWRVWDLNSRRKLMAYAEKHGIPVPVSHEKPYSSDENLLHISFEGGVLEDPWQEPEERMFQLSVSPEQAPDKPTYIELEFAGGNPVAIDGERLAPAAMLARLNQLGGQNGIGRLDMVENRFVGMKSRGVYETPGGTILRCAHRDLETITLDREVMRIRDSLVPRYSELIYNGFWFAPEMQLLQSTMDQTQATVNGVVRLKLYKGNCLPVGRKSDNSLYQESFATFEEDSVYHQADAEGFIRLQGLRLRMQALRGEINR

SEQ ID NO: 36050 - protein, 299 aa, delta proteobacterium MLMS-1
MSDAQPSVISCGFVALIGAPNAGKSTLLNRLLGQKIAIVTPKPQTTRNRILGVVNHRDYQMVLLDTPGLHRAKNRLNSEMVRLARNAAGEVDVVAYLVDVSSETEAEQRRHAQKLLREAGKPALLLGNKIDRIGKEKLLPLIAAWQEVYPFQAIIPLSALTGEGCQLFLTEASRLLPTGPRLFPEDIPTDASERFICGEIIREKIMLLTRDELPYSVAVVIDQFLEKPGMTTIQATIMVEKDSQKGIVIGKKGVMLQQIGERARREIETMLGQKVLLKLWVKVQKNWTGNRRILQELGF

SEQ ID NO: 36051 - protein, 558 aa, delta proteobacterium MLMS-1
MSASDTPGPSDFIREIITADLASGKHQQVVTRFPPEPNGYLHIGHAKSICLNFGLAREHTPARCHLRFDDTNPSKEESEYVESIKEDVRWLGFDWGEHPYFASDYFEQLYEYAEHLIKNSKAYVCDLSAEEIRESRGTLTEPGRDSPYRQRSVAENLDLFRRMRSGEFADGARVLRARIDMAAGNLNLRDPVLYRIMHQSHHRSGEQWCIYPMYDFTHPLSDALEGITHSLCTLEFADHRPLYDWFLDNLPVPARPRQIEFARLNLAYTVVSKRKLLQLVNDGHVEGWDDPRMPTLCGLRRRGCPPAAIRDFCERIGVAKKESLVDLALLEHCVREELNNSANRVMGVLKPLKVVISNYPEDQFEEVTAQNHPQQPEKGSRQLPFGRVIYIERDDFMEEPVKKFFRLAPGREVRLRYAYFIRCDEVIKDAAGQVTELRCTYDPATLGGSAPDGRKVKGTIHWVAAAQALKAQIRLYDRLFSSETPDKAGGDFKECLNPESLITLEDCRLEPGLATARAGEYFQFERQGYFVLDPKMSQPGRPVFNRSATLRDTWAKQR

SEQ ID NO: 36052 - protein, 867 aa, delta proteobacterium MLMS-1
MQFDKFTMKSQEAVQAAQSLAQELQHQELQPEHLLKVLFDQTDGVIAPALQKMGVSREKLASEIGNRLSRLPKVSGAGAGRLYAAPALQRLFDRAFKVAAEMQDDYVSQEHLVLALLDDKDNEVARVLSKEGLTRDAFLQALTAVRGSQRVTDPNPEEKYQALEKYARNLTDVARQGKLDPVIGRDDEVRRVIQVLSRRTKNNPVLIGEPGVGKTAIVEGLAQRIVNGDVSDTLRDKQVIALDMGSLVAGAKYRGEFEDRLKAVLQEIEKRQGEVILFIDEIHTLVGAGAAEGSMDASNMLKPALARGELHCVGATTLKEYRKYIEKDAALERRFQQVLVQEPSIEDAIAILRGIKEKYEVHHGVRIQDSATVAAVTLSNRYITDRFLPDKAIDLIDEAASRLRIEIDSMPTEIDEIERKKIMLEIEREALKKESDKSSRERLAKLEAELADCNETLNAMKGHWNLEKEVIQQLREIKAKIDEARIEAQQAERQGDLSKVAEIRYGRIVELEKELAAKNERLAEVQQDRKMLKEEVDEEDIAKVVAKWTGIPVDKLLEGEKEKLVAADGELSKRVVGQREAISAVANAVRRARAGLQDPNRPLGSFIFMGPTGVGKTELARSLAAFLFDTEKAMIRLDMSEFMEKHSVARLIGAPPGYVGYEEGGYLTEAVRRRPYSVILFDEIEKAHPDVFNVLLQILDDGRMTDGQGRTVDFKNTILIMTSNLGSQLIMELGEARREEIKTRVDEILHAQFRPEFLNRLDEIIIFHALSREDLRQIIDLQAELLTGRLAERHYQIELTPAAKEFLIEVGYDPNYGARPLKRAIQRHVLDALAMKILEGNFAEGDTIVVERWEGAESLSFERRQPQ

SEQ ID NO: 36053 - protein, 642 aa, delta proteobacterium MLMS-1
MGKIIGIDLGTTNSCVAVMEGGEAKVITNAEGNRTTPSVVAFNDAAERLVGQVAKRQAVTNPTRTLYAIKRLIGRKFTDDAVKKSLEISPFKIVEGKDGDAVVEVDGKQYAPAEISAMTLGKMKQTAEEYLGETVTDAVITVPAYFNDSQRQATKDAGQIAGLNVQRIINEPTAASLAYGLDKKSEEKIAVFDLGGGTFDVSILEIGDGVFEVKSTNGDTFLGGEDFDMRIVNWLADEFKREQGIDLRSDKMALQRLREEAEKAKQELSSTVETNINLPFITADASGPKHLNIKLSRSKLESLVGDLIERTLGPCQTALKDAGVSASDIDEVILVGGMTRMPKVQEKVKEIFGQEPHRGVNPDEVVALGAAIQGGVLQGDVKDVLLLDVTPLSLGIETLGGVMTKLIEKNTTIPTKKSQVFSTAADNQPAVSIHVLQGEREMASDNKTIGRFDLADLPPAPRGVPQVEVTFDLDANGILHVSAKDMGTGKEQSIKIQASSGLSEEEIERMQKDAESHAEEDRKRRALVEARNQADALIYSTEKSLKDLGDKVDAETKGKVESEIASLRQVMEQDDPEAIQKGIESLTQASHKLAEMMYSQSGGQGGAAGGGPEGGGADGESGQSQGGGQDDDVVDADYEEVK

SEQ ID NO: 36054 - protein, 315 aa, delta proteobacterium MLMS-1
MSVNEMKIFAGNASPALAESICSHLQTPLSKAEVRRFSDGEIFVELGENVRGRDVFVVQPTCPPVNDHLMELMIIVDALRRASARRITAVMPYYGYSRQDRKVAPRVPITAKVVAEMLMVVGVRRVLTMDLHAGQIQGFFNIPVDNLYAAPVLLDYMHRDLDVSRVVMVSPDAGGVERCRAYAKRLNTTLAIVDKRREKANECEAMSVIGDVKGKIAVMLDDMVDTAGTLCSAAKVLKESGASEVIACCSHGVLSGPAIERLEKSQISQLVITDSVPLRGAARECAKIKVLSVSKLLAEAIRRIHSEDSVSSLFV

SEQ ID NO: 36055 - protein, 304 aa, delta proteobacterium MLMS-1
MKVLISDNLAPVGEKIMRDAGLEVDVRTGLSPEELVKIIPAYDGLVIRSASKVTAEILEAAENLKVVGRAGIGLDNVDVPAASKKGVVVMNAPDGNATTAAEHAVSMMMALTRNIPQATASMKAGKWEKKKFQGHEVTAKVAGVVGIGRIGRIFAERAMGLRMKVIAFDPHMPAEQMEKIGVEPVTLEELCQRADYISVHVPLTPETKHVLGAEQFAMMKPTTMVVDCARGGVVDEKALYEALKTKTIRGAALDVFEVEPTTLENCPLLGLDNFICTPHLGASTAEAQENVRGGHRRTASPTIY

SEQ ID NO: 36056 - protein, 458 aa, delta proteobacterium MLMS-1
MPDRPLRQTASPPTPATSQGRLLVVDDEPFVLQLVSLQARGLGYQVETANSGPKALLRLRNNNKPPIDLLLTDILMPKMDGLSLLEQARHLQPELEVIVISGQDEIKTAVAAMRRGARDYLQKPFSIQELEIALTKGMEHVRLQRRLSHQQEQLQRSHHELDQYHKQLEKLVAERTAELATANHRLKEDIKARKRAEKEARQRRRQLIEADKMASLGILVAGVAHEINNPNNFIAMNAPTLERIWRDLLPLLARLEEDDEPIRAAGLSLPELQRHIPELLNGISSGSRRINQIVKNLNDYARQSSADMNQEFTLEQVAQAALGLLASPLRQATRQLRVELNPELPPIKGNFQRIEQVMLNLLQNASQALESPEQGITVRTIGADQANWIGLEVTDQGRGIGKRDLKRVQDPFFTTKRDIGGTGLGLSISAGIMEEHGGRLEFASQPGEGTTVRAIFPL

SEQ ID NO: 36057 - protein, 551 aa, delta proteobacterium MLMS-1
MESAQRLDHNSELSLLEFPYIIRWREDRCSRCGRCTAVCPTRAIEASVLAQRLVHSEGDTPLPATIKRVSSVIRQVNDIDRHCVGCGTCSLVCPNMAIMPEYNPRHKFLFHKNRGGIPYARGGRRNDPATSTLDKLKFTRISMLTDPSLDAGRHEFHIRTLMGRNLPAEELPLERQGDLLLPRPGAFVPPVREIFPIRIGGMSIGALSPPMWEGLAMGVAYLNEVENIPVVMCSGEGGLPPRLLKSRYLKYFIPQIASGYFGWDEIIHALPEMIEDPAAIEIKYGQGAKPGDGGLLMAYKVLKLIAKIRGVPVYVDLASPPTHQTKYSIEEAVAKMIQSVSMAWGFRVPVYPKISGTKTALAVLNNLARNPYAAALTIDGEDGATGAAYNVSMDKMGHPIASNLRDCYLELVKSGKQNELPLFAAGGVGKEANLAANAAALILLGASGVDIGKYIMQAAAECYGDEYNRCNLCNLGRCPRGITTQDPRLYRRLDADRVAERVVDIFKTAETELKKIFAPMGRSTQLPIGMADGLGVGDQAIADRLSISYVC

SEQ ID NO: 36058 - protein, 102 aa, delta proteobacterium MLMS-1
MYAIIRTGGKQYQVAPGERLRVEKLAGEIGDTVELDEVLLVADGGEIKVGQPVVEGAKVTARIVEQDKAKKINVFKKKRRKGYRLMKGHRQPFTALEIKEIR

SEQ ID NO: 36059 - protein, 357 aa, delta proteobacterium MLMS-1
MSFIDETKFYVKAGDGGNGCVSFRREKHVPKGGPDGGDGGKGGDVIIEVSARLSSLLDFKYRSHFKAEDGAHGQGSKKHGKKGGDCVVAVPPGTVLRDAESGELLADLVADGQRYLAAAGGKGGKGNVHFASGANRAPRTATKGKSGEEFWFNLELKLIAEVGLIGLPNAGKSTLLTRLTAATPKVADYPFTTLAPQLGVLFFEQRPPCTIADIPGLIADAHLGAGLGHTFLRHIERTRLLVQVIDASGLEGDPLEQYDILERELASYQQDLLQRPRLVVLNKIDLLGDDGLQWQELVERFGRRGVTPLAVSALGGQGVQRLIEALAASLPQPAVASQVAAGGQQQPVAEEESQDHE

SEQ ID NO: 36060 - protein, 402 aa, delta proteobacterium MLMS-1
MAGPIELAARVKEIKASPTLAVDAKAKALKAQGADVLNFSVGEPDFDTPPHVCEAGKAAIDEGFTRYTPVPGILPLRQAVCDRQAADHGRHYQPDEIQICCGGKHGLYNMAQAMFGPGDEVLIPAPYWVSYPPIVQLAGATPVIVPLDEKSAFDLDPAILADYTSPRTRGIILNSPSNPTGSVLSARALTAIAAMALEQGWVVISDDIYDTIVYGTEKLPHILDLEPKLRDQTLILNGVSKSFAMTGWRIGYTAGPQHVIAAMNKIQSQSTSNPSSIAQKAALAALTGPQDFPTTMRDAFVPRLDFMVGALNAMAGISCVRSRGAFYVFPNMSAYYGRKTPAGTSIDGSLALADYLLEDALLATVPGVAFGADDFIRFSFATSLAVLEEGMERLAAALAKLN

SEQ ID NO: 36061 - protein, 461 aa, delta proteobacterium MLMS-1
MARILVVDDEEDIRTALRIVLSGEGYEVETAANGRVAIDLLEKHSFDMVITDLKMELADGYDVLKKVREFDSLTPVIIITAFGSIDSAVEAMKLGATDYIVKPFLHEDIKFTVRNILEHGSLRLENLALKRQLSQKLDNKKIVGLSEAMNKVFDTIEKAAPTKANIMITGESGTGKGLLAEAVHQNSPRRDKPFMAINCAAIPETLLESELFGYKKGAFTGANSNKTGLITMADGGTLFLDEIGDMPMVIQSKILKVLESGEVLPLGDTKTRNVDLRIISATNKDLESCIREKTFREDLYYRLNVIEIRMPALRERREDIPLLAAKFIKEEEAVPDKVVKGFDEGAMKAMMAYPWPGNVRELKNVVERAVIFAGGEQITPAELPAKIRRGDATAGPGGNTEVSGLQPLKAMVYDYEKDIIINALNRFDGSKEMVAKTLGIDLTTLYRKMSKLGIDEEALKK

SEQ ID NO: 36062 - protein, 227 aa, delta proteobacterium MLMS-1
MNIADFLTSVPLFKGLARPQCDELAMIATDQEYARGATIFAEGDPGEGFFLVVSGLVKIYKLSLDGKEQILHIFGPGEPFAEAAVFIGSPYPAHALALEKSRVLFIPRRAFIELIHRHPELALNMLAALSLRLKKFAQLIEELSLKEVPGRLAAHLLFLSDQQQGTAEIQLPVSKSQLAGLLGTIPETLSRILGKLNKGGLIASDGPRITILDRPGLEELAAGETKL

SEQ ID NO: 36063 - protein, 299 aa, delta proteobacterium MLMS-1
MSDAQPSVISCGFVALIGAPNAGKSTLLNRLLGQKIAIVTPKPQTTRNRILGVVNHRDYQMVLLDTPGLHRAKNRLNSEMVRLARNAAGEVDVVAYLVDVSSETEAEQRRHAQKLLREAGKPALLLGNKIDRIGKEKLLPLIAAWQEVYPFQAIIPLSALTGEGCQLFLTEASRLLPTGPRLFPEDIPTDASERFICGEIIREKIMLLTRDELPYSVAVVIDQFMEKPGMTTIQATIMVEKDSQKGIVIGKKGVMLQQIGERARREIETMLGQKVLLKLWVKVQKNWTGNRRILQELGF

SEQ ID NO: 36064 - protein, 558 aa, delta proteobacterium MLMS-1
MSASDTPGPSDFIREIITADLASGKHQQVVTRFPPEPNGYLHIGHAKSICLNFGLAREHTPARCHLRFDDTNPSKEESEYVESIKEDVRWLGFDWGEHLYFASDYFEQLYEYAEHLITSGKAYVCDLSAEEIRESRGTLTEPGRDSPYRQRSVAENLDLFRRMRSGEFADGARVLRARIDMAAGNLNLRDPVLYRIMHQSHHRSGEQWCIYPMYDFTHPLSDALEGITHSLCTLEFADHRPLYDWFLDNLPVPARPRQIEFARLNLAYTVVSKRKLLQLVNDGHVEGWDDPRMPTLCGLRRRGCPPAAIRDFCERIGVAKKESLVDLALLEHCVREELNNSANRVMGVLKPLKVVISNYPEDQFEEVTAQNHPQQPEKGSRQLPFGRVIYIERDDFMEEPVKKFFRLAPGREVRLRYAYFIRCDEVIKDATGQVTELRCTYDPATLGGSAPDGRKVKGTIHWVAAAQALKAQIRLYDRLFSSETPDKAGGDFKECLNPESLITLEDCRLEPGLATARAGEYFQFERQGYFVLDPKMSQPGRSVFNRSATLRDTWAKQR

SEQ ID NO: 36065 - protein, 384 aa, delta proteobacterium MLMS-1
MMSKIYLDNNATTPLDAEVSAAMGECLAANFGNPSSGHSFGESARLALEEAREEVAALIAAPSSQLIFTSGGSEANCQAILSAVLARPERRKLVTSAVEHPSVLQPLRYLAAQHGYQLLELAVDEAGLLDPAALDAAVDEDTALVSLMAANNETGVLWPVAELGEICRQKGVLFHCDAVQLVGKEEIAAASWPVDYLTLAAHKLHGPKGSGVLYHAPEAPVSPLVMGAGQEGGRRAGTENVAGAVGLGRACSRAAAHLAAGGREQMLALGRRLEEGILAGCPEARINGAGAPRLANTVNVSFEHCSSAQMIQDLDERGFAVAAHAACHSGDLDPSPVLAAMAVPESYRHGTLRISLGRLNTAAEVEELLAVLPAVVAHSRQGFV

SEQ ID NO: 36066 - protein, 399 aa, delta proteobacterium MLMS-1
MSSEQPARVIYMDNNATTRVAPEVLEEMLPYFSELYGNPSSMHTFGGQVGRQLRVARSRVAELLGAQPEELIFTSCGTESDSTAILAALQAHPDKRHIVTTRVEHPAVKNLCEHLDQLTGHKHRVTQLPVDSQGMIDLARYEAALGEDTALVSVMWGNNETGVIFPVEEMAQIAKSRGILFHTDAVQAVGKIPINLAASAIDYLSLSGHKLHAPKGVGALYVRKGAPFAPLIIGGHQEESRRGGTENVAAIIGLGRACQLAAARMDEENGRVKALRDKLEQGLLAKIPNALLNGHPEQRLPNTTNISFEYVEGESILLHLDQHGICASSGSACTSGSLEPSHVLRAMGVPFTAAHGSVRLSLSVYNSEEEVDFVLAKLPDIIANLREMSPFWQENRGRT

SEQ ID NO: 36067 - protein, 665 aa, delta proteobacterium MLMS-1
MSESPIESGTNARIRINPPVFIISAVLTVLLVGFAAIATETAALVFNATQSWVTESAGWFYVLAVAGFLVFIIGLAISNFGLVKLGSDHSEPDYSYLSWFAMLFSAGMGIGLMFFGVAEPVMHYVSPPVGDPETAEAARQAMRITFFHWGIHAWAIYAVVAISLAYFAFRQGLPLTIRSSLYPLIGERIYGPIGHAVDIFAVLGTIFGVATSLGLGVVQINSGLDYLFGIPSSAVTQVILIAVITGFATISVVLGLDGGIRRISELNIILACSLLLFVLVFGPTIFLLQTLVQNTGMYISSVFEMTFNLYAYEPTDWIGGWTLFYWGWWIAWAPFVGMFIARVSKGRTIREFVVGVLLVPVGFTFMWMTFFGDTALHMLMVQGISALSEAVAADTSVALFQFFEQLPFSTITALVATLLVVTFFVTSSDSGSLVVDILTSGGHAEPSPVWQRIFWAVVEGVVAATLLLAGGLAALQTATIASALPFTVIMIVMCWGLLRALRIEGFKQVSLREARVMPRGPHAALNWRKRLRTLLHHPGKREVLEYLETVVKPALEEVAEELAKQQIEARTGQGEDGRVWVEVLQGEEIDFYYSVRPRAYEPPALVMRDTRADRVEALKYYRAEVHLQEGGQDYDIMNWGRDYVISDVLEQYERHLHFLKAVRHQ

SEQ ID NO: 36068 - protein, 295 aa, delta proteobacterium MLMS-1
MQTEVSYPSFLGDEAVVAGADRIAVLSAPLANTVSWGGGAEHGPAAILEASLALEVFDDELLQETVQAGIVTRPPLALAGLDSATACRLVDEAVSVELAAGLFPVLLGGEHTVSGPAALAMQRYYPALHVVQVDAHLDLRREYDGTPLSHACVMRRIAEAGMAFSQVGIRSFAAEEWQLVQQRGWQPFTMARIRSHEDWLEQLLAEIKGPVYLTVDVDGLDPAIMPATGTPEPDGLYWPQLIALARALATGPGLVGLDVVELAPKPGLAHAAFTAAKFIYRTLGYAFPTSVHQGR

SEQ ID NO: 36069 - protein, 311 aa, delta proteobacterium MLMS-1
MSTSREQAREVLRLEAEGIEAVRERIDDAFERAVELIMACPTRLIVSGIGKSGIIGQKIAATMNSTGTPALFLHPVEAMHGDLGIVDPRDVVLAISYSGETAELNLLLPTLKSRGARIIAMTGRPDSGLAAAADAVLNVAVPCEACPLGLAPTASTTATLALGDALAVVLLRRKNFAAGDFRRNHPGGSLGERLKIRVSEVMLTGAEIPTVAEDASLPEAVAELNRKNLGAVLVMAADGETMVGILTDGDLRRMVADGRQADFAELSLTAVMGRDPKCITPELLAADALSIMQRHEVTVLPVTDARRRLSD

SEQ ID NO: 36070 - protein, 461 aa, delta proteobacterium MLMS-1
MQTILVVDDEPNYLVILEELLREEGYEVFCAESGQQALEIIKQSDLDLVITDMRMPGLDGLELLKSSKERNPDLPVIMITAFGEVEKAVAAMRTGAFNYLTKPFDNDELLVSVRQAVDHYRVIKENTRLRAEISQQDSYACMVGKSRRMREIYSLIDKVAPTPTSVLITGESGTGKELVARAIHTQSPRHKAPFITLNCAGLPENLLESELFGHEKGAFTGAVALRKGRFELADGGTLFLDEVGEMPLSLQAKLLRVIQERNFERVGGNATIEVDVRLIAATNKELKEEVERGNFREDLYYRLNVVHIHLPPLRERLDDIPMLAAHFVGKFASSLQRPELRIEPETLRLLATLPWDGNVRELENTIERAAVLCADDLITPEDVQPDPAGSAGAAEWGENLDLDQLIPPGTPLPEVLNAIEKRLVSTALQQAEQVQIRAAENLGITKSLLQYKMKKFGLQKK

SEQ ID NO: 36071 - protein, 66 aa, delta proteobacterium MLMS-1
MAEGTVKWFNDAKGYGFIAQDSGSDVFVHHTAIEGQGFKSLQEGARVEFEIVDGPKGPAAGNVRQL

SEQ ID NO: 36072 - protein, 127 aa, delta proteobacterium MLMS-1
MLRTMLKSKIHRATVVDAELHYEGSLAVDAELMAAVDLAPFERVHVYNMNNGERFETYVIKAPAGSGMIGLRGAAARKGQPGDMVIIVNYAHYSAKELSDHQPQIVLLDEQNRIKRRGLATAADPGA

SEQ ID NO: 36073 - protein, 507 aa, delta proteobacterium MLMS-1
MNTLIKKNIVFLVSLGIALAVIIMGIGKPELLDEISAWLHTGIIDNFGWSYLLGSLFFLVFSIGLAVSRFGDLKLGQDHEKPQYGYFGWFSMLFAAGMGIGLIFWGVAEPLSHYAQPPGYLKPQSGEAAAFAMRHSFFHWGLHPWAIYIIMSLAVAYFSFRRGMPPLISSCFYPLLGERINGPIGYLIDILSVLATIFGIVTSLGLGAIQITSGLATISPLPDVFATTLGVIAVVTVLFLISSLTGLDKGIQMLSKANIILALLLLTFMLIVGPTVYILSIFTTTIGQYFANLLEMSLASNPFEGYQWTKSWTMFYWAWWISWAPFVGLFVASISRGRTIREFILGAMLVPTLLTFVWFSVFGGAGLHLQIVGQVDISGQVAENVSVALFQLFEHYPLSNLLTLITVLLLMVFFITSADSATYVLAMMTSNGELRPSNWKKIIWGVTVSTTACILLFTGGLEALQRMAITAALPFAIIMLLLCYCLWLGMSYELDQRPPTQPPERQD

SEQ ID NO: 36074 - protein, 493 aa, delta proteobacterium MLMS-1
MGRKILVVDDEQNMRIALYEALSRSGHQVTLAENGRLALELIEQQPPDLVVTDIRMPEMDGIEMLQQIKARAPQLPVVIITGYATVETAVEAMKQGAVDYILKPFPVEVIDETVRKVFKQRQGEAALGSEGATPAAAVPVAASDQRTVIGRDAHFLRLLERARAVASSKATVLVLGESGTGKEVFARFIHHVSDRKAGPFVALNCAALPEGLLESELFGHEKGAFTGAVMSKKGKFEQAHGGTLLLDEIGEVPLHLQAKLLRVLQEEEVDRLGGKEPVKVDVHVLATTNRDLGAAVREGNFREDLFYRLNVIPIRLPAMRERPEDISLLADHFIEKYTARYQKPAKKLSAASRQRFLEYQWPGNVRELENLVERAVLLSAGPELEPWDFWEDELPPAGAVTGATDPELAGSANPEPVAAADLALAGSNTDAAASAAEIAIDPSRHSLWDVERQMILRALRQTSDNRTHAAKMLGISVRTLRNKLNEYRTKGVL

SEQ ID NO: 36075 - protein, 642 aa, delta proteobacterium MLMS-1
MGKIIGIDLGTTNSCVAVMEGGEAKVITNAEGNRTTPSVVAFNDAAERLVGQVAKRQAVTNPTRTLYAIKRLIGRKFTDDAVKKSLEISPFKIVEGKDGDAVVEVDGKQYAPAEISAMTLGKMKQTAEEYLGETVTDAVITVPAYFNDSQRQATKDAGQIAGLNVQRIINEPTAASLAYGLDKKSEEKIAVFDLGGGTFDVSILEIGDGVFEVKSTNGDTFLGGEDFDMRIVNWLADEFKREQGIDLRSDKMALQRLREEAEKAKQELSSTVETNINLPFITADASGPKHLNIKLSRSKLESLVGDLIERTLGPCQTALKDAGVSASDIDEVILVGGMTRMPKVQEKVKEIFGQEPHRGVNPDEVVALGAAIQGGVLQGDVKDVLLLDVTPLSLGIETLGGVMTKLIEKNTTIPTKKSQVFSTAADNQPAVSIHVLQGEREMATDNKTIGRFDLADLPPAPRGVPQVEVTFDLDANGILHVSAKDMGTGKEQSIKIQASSGLSEEEIERMQKDAESHAEEDRKRRALVEARNQADALIYSTEKSLKDLGDKVDAETKGKVESEIASLRQVMEQDDPEAIQKGIESLTQASHKLAEMMYSQSGGQGGATGGGPESGGADGESGQSQGGGQDDDVVDADYEEVK

SEQ ID NO: 36076 - protein, 328 aa, delta proteobacterium MLMS-1
MSTSREQAREVLRLEAEGIEAVRERIDDAFERAVELIMACPTRLIVSGIGKSGIIGQKIAATMNSTGTPALFLHPVEAMHGDLGIVDPRDVVLAISYSGETAELNLLLPTLKSRGARIIAMTGRPDSGLAAAADAVLNVAVPCEACPLGLAPTASTTATLALGDALAVVLLRRKNFAAGDFRRNHPGGSLGERLKIRVSEVMLTGAEIPTVAEDASLPEAVAELNRKNLGAVLVMAADGETMVGILTDGDLRRMVADGRQADFAELSLTAVMGRDPKCITPELLAADALSIMQRHEVTVLPVTDARRRLFGILHLQDMFGKGEFRFLV

SEQ ID NO: 36077 - protein, 551 aa, delta proteobacterium MLMS-1
MESAQRLDHNSELSLLEFPYIIRWREDRCSRCGRCTAVCPTRAIEASVLAQRLVHSQGDTPLPATIKRVSSVIRQVNDIDRHCVGCGTCSLVCPNMAIMPEYNPRHKFLFHKNRGGIPYARGGRRNDPATSTLDKLKFTRISMLTDPSLDAGRHEFHIRTLMGRNLPAEELPLERQGDLLLPRPGAFIPPVREIFPIRIGGMSIGALSPPMWEGLAMGVAYLNEVENIPVVMCSGEGGLPPRLLKSRYLKYFIPQIASGYFGWDEIIHALPEMIEDPAAIEIKYGQGAKPGDGGLLMAYKVLKLIAKIRGVPMYVDLASPPTHQTKYSIEEAVAKMIQSVSMAWGFRVPVYPKISGTKTALAVLNNLARNPYAAALTIDGEDGATGAAYNVSMDKMGHPIASNLRDCYLELVKSGKQNELPLFAAGGVGKEANLAANAAALILLGASGVDIGKYIMQAAAECYGDEYNRCNLCNLGRCPRGITTQDPRLYRRLDADRVAERVVDIFKTAETELKKIFAPMGRSTQLPIGMADGLGVGDQAIADRLSISYVC

SEQ ID NO: 36078 - protein, 394 aa, Ralstonia metallidurans CH34
MQKDPVVIVSAVRTPMGAFQSELSSLMAPQLGAAAIRAAVERAGIKPEQVQEVVFGCVLPAGQGQAPARQAALGAGLPLDVACTTVNKMCGSGMRAAMSVYDGLLAGSFDIAVAGGMESMTNAPYLVPKARGGYRIGHGMIYDHMMLDGLEDAYDKGRAMGTFGEDCAAKYHFTREQQDAFAMESVRRAQRATEQGDFRWEIVPVTVSGKGGDTVIDTDEGPRRIKVDKIPSLKPAFAKDGTITAASSSSINDGASALVMMRESTAKSLGLQPIARMLGHTSHAQAPGWFTTAPVEAIAKLYRKLDWNTGSVDLFEINEAFAVVPMAAMHDLDIPRDKVNIHGGACALGHPIGASGARIMTTLIGALRKTGGKRGVASLCIGGGEATAVGIELY

SEQ ID NO: 36079 - protein, 469 aa, Ralstonia metallidurans CH34
MSLFRTKNIDAMLEVSEHDGLRKVLGAVDLVLMGIGAIIGTGIFVLTGTGALTAGPALTVSFVIAAMACGFAALCYAEFASAIPVSGSIYTYSYATLGEIVAWMIGWDLLLEYGLATSAVSVGWSGYFQSLIAGFGIHLPTVLTAAPGAVPGEHTLFNLPACLIMLAITWIVSYGVKESARLNNVMVAIKIGVVLLFIAVGVWHVKPANWQPFAPFGMTGVFNAAALVFFAFIGFDAVTSAAEEVRNPRRDLPIGIIGSLAVCTILYVTVAAIMTGIVPFMKFEGVDHPVSLALQYAGQNWVAGFVDLGAILGMTTVILVMTYGQTRIIFAMSRDGLLPEALSTVHPVHATPYTATWTVGIVFAAIAAFVPLNVLAELINIGTLAAFTLISIAILVLRRTRPDLRRGFRCPGVPVVPLLAVGFCLFLMAHLQALTWIAFLCWIGLGLIIYFAYSRRNAVLHNHGGDAEG

SEQ ID NO: 36080 - protein, 434 aa, Ralstonia metallidurans CH34
MPSRLKVLKPQRANDTAAADAAPACHGRRRALATIAGASVMTLVDPLVRSGAWAAGSDAPEKPEVRIGFIPLTDCASVVMASTLGLDKKYGIKITPSKEASWAGVRDKLVNGELDAAHVLYGLIYGVQLGIGGPKKDMAVLMNLNHNGQAITLSSKLAEKGVKDGASLKALMSREKRDYVFAQTFPTGTHAMWLYYWLAANGIDPMRDAKAITVPPPQMVANMRVGNMDGFCVGEPWGARAIADKIGFTAETTQAIWKDHPEKTLGTTAEFVQKYPNTARAMVAAVLDASKFIDASASNRRKTAETIAAKSYVNTDMDIILDRMLGRYSNGLGKTWDDPDSMKFYQDGLANYPFLSDGMWFLTQHKRWGLLKEHPDYLAVAKQVNRIDIYKQAAVAAQVPLPKSDFRTARLIDGVTWDATKDPKAYADGFKIKA

SEQ ID NO: 36081 - protein, 317 aa, Ralstonia metallidurans CH34
MSVEGLMVFTGNANPKLAEAVVQHLGIPLGKALVGRFSDGEVQVEIQENVRGKHVIVLQSTCAPTNDNLMELMVMVDALKRASARSITAAMPYFGYARQDRRPRSARVAISAKIVANMLEVAGVERVLTMDLHADQIQGFFDIPVDNIYASPVLLGDLREKNYGNLLVVSPDVGGVVRARALAKQLDCDLAIIDKRRPKANVSEVMNIIGEVAGRNCVIMDDMIDTGGTLCKAAQVLKERGAQKVFAYCTHPVLSGGAVARIAASALDEVVVCDTIPLSDEARQTGKIRQVTTAPLLAETFTRIVRGDSIMSLFADA

SEQ ID NO: 36082 - protein, 327 aa, Ralstonia metallidurans CH34
MIANFDADRALRLARQTLEIEAEAVSALAGRLTPAFTTAVEMILGCTGRVVVSGIGKSGHIGRKVAATLASTGTPSFFVHPAEASHGDLGMITRDDVLIAFSNSGETAELLAIIPIVKRIGAGLISITGNAESNLAKLSNAHLDGAVAQEACPLNLAPTASTTAALALGDALAVAVLDARGFGEDDFARSHPGGALGRKLLTHVRDVMRTGNAVPAVRESTPLAQALMEITRKGMAMTAVVDPDGRAVGVFTDGDLRRLLETPRDWKTVPIGEVMHRNPHTVHLDKLAVEAVQIMETNRINQLLVVDDDGHLAGALHIHDLTRAKVI

SEQ ID NO: 36083 - protein, 399 aa, Ralstonia metallidurans CH34
MSTSPSRQSSLTEAPPRARDVVHALRASRIREVANAGIGLPDVLPFWFGESDQVTPSFIRDAASRALANGATFYNHNLGIAPLRAALSEYVTRLHGATPVDHIAVTSAGVNALMLAAQLVTGPGDRVVAVTPLWPNLVEIPRILGAAVETVTLDYGADGWTLDVDKLLAALTPGTRAVMINSPNNPTGWVMPRGAQQAVLDHCRRHGIWIIADEVYERLYYGDEGAVAPSFLDIAGRDERVIAVNSFSKAWLMTGWRLGWMVVPSSMMDDLGKLIEYNTSCAPSFVQEAGVVAVREGEAFTQDLVKRLRSARDHLVSALSALPGIDAHAPDGAMYVFFRLKGATDSLDLCKRLVRDAHLGLAPGSAFGDEGEGFVRWCYACDEARLDEGVKRLRGYLGR

SEQ ID NO: 36084 - protein, 464 aa, Ralstonia metallidurans CH34
MGRLVAVSNRVADPRNHAAGGLAVALSDTLNKTGGLWFGWSGKVVDASRGGTPGEGELHQIQAGNVTLATVDLSREDFESYYLGYSNGVLWPVFHYRVDLADFDSGGNLNAYRRVNQLFARKLAPLLKPDDVIWIHDYHLIPLAAELRAIGCGQRIGFFLHIPLPPRLILATIPQHEWLMRALFAYDLLGFQSHDDVEHFSRYVQGEAGAEPMGEYRFRAFHRTVRAQAFPIGIDVDEFIELGRADEARETYEMMRGQYARRRLLLGIDRLDYSKGLPQRLKAFQTLLAEYPENRSSATLIQIAAPSRESVDAYADLRRDMEGITGAINGEYGELDWMPVRYIHRSTARRRLPGLCRACNVALVTPLRDGMNLVAKEYIAAQDPEDPGVLVLSRFAGAAEQLKEALLVNPYDTRATAQAIQQALHMSLSERQARHQKLLERIRQQDVHWWSGEYLRALMETEGG

SEQ ID NO: 36085 - protein, 398 aa, Ralstonia metallidurans CH34
MKQLQDAYIVAATRSPIGKAPKGAFKNTRPDDLLATILQAAVAQVPSLDPALIEDAIVGCAIPEAQQGLNVARIGALLAGLPNTVGGITVNRFCASGLSAVAMAADRIRVGESDVMIAAGVESMSMVPMMGNSPSMSPSIFERDENIGIAYGMGLTAEKVATQWKVSREDQDAFSLASHQKAIAAQQAGEFKDEITPIEVVERFPDLASGQINVKTRTISLDEGPRPDTSVEGLGKLRAVFANKGSVTAGNSSQTSDGAGALILVSEKILKQFNLVPRARFVSFAVRGVPPEIMGIGPKAAIPAALKAAGLTQDQIDWIELNEAFAAQSLAVMRDLELDPAKVNRMGGAIALGHPLGATGAIRSATVVHALRRHNMKYGMVTMCVGTGMGAAGIFERV

SEQ ID NO: 36086 - protein, 392 aa, Ralstonia metallidurans CH34
MHHPFITRFTLAALTAGLIAGCAAPPRAPTSTAAREAPSTAYATTSAAPKPVLIIGHRGASALRPEHTLASYQKAIDDGADIIEPDLVATKDGVLVARHENDITGTTNVAEMPEFADRKRVKVIDGERLTGWFTEDFTLAELKTLRARERIPKLRPANAKLNDQFEIPTFDEILKLAELAAMKRGRPVGIYPELKHPTYFRGIGLPLEERLVTALQGSAYAKTVPVYVQSFEAAPLRTVKRLLGNSMPNVMIVQLIGNPRSRPADWRLAGDTRTYADMLKPIGLREVATYANGIGPEKNSVIPRDASGNLASPTALLANAHAAGLVVHPYTFRPENAFLPKSLRAPGDDATRNPAGMISEIQTFAAAGVDGVFTDDPALGRRAVDPPANGGH

SEQ ID NO: 36087 - protein, 193 aa, Ralstonia metallidurans CH34
MPQSQLKFVILDRDGVINRDSDQFIKTPDEWIPIEGSLEAIAMLNQAGYRVVVASNQSGIGRGLFEMSALNAMHEKMYKALANLGGRVEAIFFCPHTAADNCDCRKPKSGLYEQIGERFGIELRTVPTVGDSLRDLQAGVAVGCIPHLVRTGKGMKTLEKGGLPDGTRVHDDLAAFARWLIDDAAPKPQPTAP

SEQ ID NO: 36088 - protein, 540 aa, Ralstonia metallidurans CH34
MSFSELGLSDKLVRAVAEQGYTTPTPIQAQAIPAILKGGDLLAGAQTGTGKTAGFTLPMLQLLSETAARANGGNAPRGARPNVRALVLTPTRELAAQVEESVRNYGKYLKLRSMVMFGGVGINPQIEALRRGVDIVVATPGRLLDHVAQRTIDLSHVELLVLDEADRMLDMGFIHDIRKVLNVLPPKRQNLLFSATFSDDIRALADRLLDNPASIEVARRNTTAETVAQRVFPVDRERKRELLAHLVRQHDWHQVLVFTRTKHGANRLAEQLTKDGLSALAIHGNKSQSARTRALTEFKAGTLRLLVATDIAARGIDIDQLPHVVNFDLPNVPEDYVHRIGRTGRAGAEGEAISLVCVDEHGLLRDIERLIKRQIEQVLLPGFEVDPSIKAEPIQKGRQQQRGGQPRGNGQGNAGNGGERRQPRAAQGERQEAPRQPRPAQPARGEARNGNAGGSGNAPRTGQGGGRGNGHANSTAKGTAKGTAKGNAQGNAQGNANARGANPRPQQARPAQDNTAAPPARNRRPAPQAALLGGGRKPAH

SEQ ID NO: 36089 - protein, 339 aa, Ralstonia metallidurans CH34
MQFHRLTVADVVAETEDARSFALAIPEPLRGAFRYRAGQHLTFRVDVGGETLMRSYSLSSAPESLGLPVVTVKRVAQGRVSNWFHANVGPGSVLDVSEPTGRFVCDDGAAPLVFCAAGSGITPVLSMIRSALATTARHITLFYANRDAASVIFGQAIARLVADHPERLTVRWHYDDEHGIPDAQTLGQMLRRNADFHLYLCGPAPFMAMIQQAAGEAGVAGGRVHLERFDAAPVVASAAVTATAAMTSCDARVTMKGEQHTVRVEGGQSLLQAMLEAGLDVPYACEEGYCGSCAAKCLDGEVAHAHNDVFSPDELAAGWILACQARPRHDRPLIITYDV

SEQ ID NO: 36090 - protein, 405 aa, Ralstonia metallidurans CH34
MTTAHPVILVVNAGSSSVKISIFSVPEAAHEDVEVLPAQLAHGQIEGIGVAPHIEGRLADGTVVADERFPVELVPDHDAAFRLIQARLQEGLRDTPPVAIGHRVVHGGMDFADAVRIDDNVIARLDALVPLAPLHQPHNLTAIRAVRAAAPDLLQVACFDTAFHAGHDPMAQLMALPYEYYEQGIRRFGFHGLSYAYIARRLKQVAPDLAEGRVIVAHFGNGASLCAMRGGKSVESTMGLTALDGMPMGTRCGTIDPGAVLWLAAQGMTPDAIQAMLYGQSGLKGISGVSSDMRALLASDTPRAKLAVDFYAYRAAQEIGKLAVTLGGLDGLVFTAGIGANSPDVRARVCAHLTDLFGISLDAAANGDNCQRISSDTSRVPVLALQTDEEGMIALSTAKILLNGG

SEQ ID NO: 36091 - protein, 599 aa, Ralstonia metallidurans CH34
MRRQRRSHPCPLLSRRQSSGAATLPIPGWLLTYRKEWLAPDVIAGLTAAAVVIPKALAYATIAGLPVEVGLYTVFAPMLIYALLGSSRTLSVSTTTTLAILVAAAFRHVGPSPSAETLITASATLTFLVGAVLLVARLLRLGFVADFISEPVLIGFKAGIGLVIVVDQIPKLLGMHFPKGPFFHNVLAIIQNIPHASVATAAVGILMVLLLLGMEHRFPRAPAPLIAVAVGIIGVWLLNLTAHGVAIVGAVPTGLPPVTLPDPTMMERLWPEALGIALMSFTETIAAGRAFTQVGEHAPAANRELTATGLANLGGAFLGAMAAGGGTTQTAVNRLSGARSQLAGLVTALAALGTMLLLAPLVGRLPEATLAAVVIVYSVSLIKPAEFLAILGIRRTEFIWALVALAGVVALGTLQGIVVAIVVSMLALAYQTSDPPVYKLARKPGTNVFRPQSDAHPHDETVPGLLMLRPEGRVYFVNARRIGHKLRPMILHDKPKVVALDLTAVSDMEYTALHMLTDAERVLREEDGVMLWLVGMNPDVLDMVRRSALGQTLTHERMFFTMDLAAVRFQTEHADAVWGPMTQPGTPPDTPPPESRPPG

SEQ ID NO: 36092 - protein, 893 aa, Ralstonia metallidurans CH34
MTTRDYSPFLRRLNDHCARALADAASLCETRAHRDIEVEHWLIKLMEQGDGDLLAILRRYELDVDGIWNGLLAAVDHLPHDLRGRPGLSQRLGQWLEAAWMRASLESTAPGVDRSIRSAHLLAALAETPHLLRAPDAWPLLSVSAAQIERLMPELDEISVEATSPITPSQGPATIATRRPAGQPDNSALSRFTTDVTQKARDGKIDPVFGRDVEIRQMVDILARRRKNNPILVGEPGVGKTALVEGLALKIAEEDVPTAIRDVTVLTLDMGLLQAGAGVKGEFEQRLKNVIEAVQQSPTPILLFIDEAHTLIGAGNTAGGADAANLLKPALARGELRTIAATTWSEYKQYFERDAALERRFQMVKVDEPDDENACLMLRGLKDRYAQHHNVHITDAAVAAAVRLSRRYLTGRQLPDKAVDLIDTAAARVRMSQEARPVAICTLEAERAALGVEYLALQQDQGATGEDKRNRLSAIETRLRELAIELGQLEFELAAQKDAADKLMVLRAQWQAATDASERHDLASSIQAAHQVLAAHGQATLLHAEVAETVVAQVIADWTGVPVDNLLSNELATLLELEARLGRVVVGQDEALAALGKSLRASKAGLKSEEAPLGVFLLVGPSGVGKTETARALADLMFGGERSLITINLSEYQEAHTVSQLKGSPPGYVGYGEGGILTEAVRQRPYSVVLLDEVEKAHRDVLNLFYQVFDRGFMRDGEGRVIDFRNTVILMTSNLGSEQILAATDATTEAGVEIPASALMETIRPLLIDRFQPALLARFQTIVYRPLAAEAMATIVGMKLAKVAERIERRFDVPLRCDDALVAELVRACLLPDSGARNIDSLLDQQILPVLSRELLIRMANRQVPASIRLSFSEEDGIGLDFDDAATTAEEYA

SEQ ID NO: 36093 - protein, 122 aa, Ralstonia metallidurans CH34
MTISKILIVDDSPTEALFMSDLLGKKGFKVSVAGNSDQAMARLEADAFDLILMDVVMPGQNGYQATRAIKRDDRFKDIPVIMCTSKGLETDRIWGMRQGASDYVVKPVDSEELLSKIAALAN

SEQ ID NO: 36094 - protein, 282 aa, Ralstonia metallidurans CH34
MQADFRRKLRQIAGVATLSALALSAAPASADQIADIKAKGQLVCGVLGTDEPFSFVDPATREIVGYDVDMCNAVAKSLGVKPVLKQISVAARLPELQQGHVDLLAASLTHNKERESQIDFSLSTFITGQKAMVRKESGITTLGQLDGKKILTVKGSTMESNIAAKIKNATVVSFDNSPQALLALEQGKGVAYVNDETSLVSNLVKLGPAAKDYTLVPQYLSSEHLALGIRKGETGFRNQVNQVLSKMETDGDAQKLYDKWFGPNTKMKFPPRAFKISTDKID

SEQ ID NO: 36095 - protein, 302 aa, Ralstonia metallidurans CH34
MKSLSVRPTPVTRLLAAAALLCAAAGAHAADGDTLKKIKDSGVISLGYRESSIPFSYSDGKEVMGYSHDYLLAIVDKVKSTLNMPNLQVKLTPITSQNRIPLMQNGTIDIECGSTTNNLERQKQVAFSNSLFIYGIRMLTKKDSGVTDFPQLKDKNVVTTAGTTGERLLVKMNGEGMNMNLTSAKDHGQAFLILESGRAAAFVMDEPLLYGERTKAKNAAEWVVAGKPLQTENYACMFRKDDPSFKKLVDGVVADIMTSGRGEKLYAKWFQSPIPPRNINMNYPLSPDMKQLFAEPNDKAFQ

SEQ ID NO: 36096 - protein, 784 aa, Ralstonia metallidurans CH34
MRTRFSFAFRFLSDAPTMTQSSPSVPPSPGLQGPWSAEIGATLQPGENVLAGLTLDLDARLHFTQGWLVVTDRRLIARAPGEKTLQDWEITAGQTLAHGDHAGVGTLELSDGQRRLASWRYTLGYNPDALRLADQFDTRRDALATGRAPEPADTEICPTCKAPLPPGEEQCPQCSRELETPPSTWALLRLWRFARPYRWELLGGFVLLLLGTAATLVPPYLTMPLMDKVLIPYQNGVPIDIGLVKLYLAGLLGAALVAWVLGWARTYLLARVSERISADLRTTTYEHLLKLSLEYFGGKRTGDLMARIGSESDRISVFLSLHLLDFATDVLMIAMTSIILVSINPWLALVTLVPLPFIAWMIHLVRDRLRHGFEKIDRIWSEITNVLADTIPGIRVVKAFAQEKREVTRFREANKHNLAINDRVNAVWSLFTPTVTFLTEVGLLVVWIFGIWQVSHDAITVGVLVAFLTYISRFYTRLDSMSRIVSVTQKAAAGAKRIFDILDHVSSVPEPQKPVHIDNVQGAIELRDLGFRYGNRAVIRGLNLSIQPGEMIGLVGHSGSGKSTLVNLICRFYDVSEGAIRVDGVDIRSLPVSEFRRHIGLVLQEPFLFFGTIADNIAYGKPDATREEIIAAARAAHAHEFILRLPHGYDSLVGERGQALSGGERQRISIARALLINPRILILDEATSSVDTTTEKEIQKALDNLVQGRTTIAIAHRLSTLRKADRLVVMDRGQIVEVGNHDELMAREGAYYKLYQAQARNVDTDADTISDGEVAEAKEAVGAQ

SEQ ID NO: 36097 - protein, 244 aa, Ralstonia metallidurans CH34
MRSCCHATLRASVILESAMRPTFDPETLPIIETDSRHAPLSTPRMRPDFIRHRLLAPPAWEPELTDESRVYDRTRGLREAAVLVPLVERSDGLTVLLTQRNANLNAHAGQISFPGGGQETYDANRIATALRETEEEIGLTRNYVEVLGSLPDYITGTGYHVSPVVGLVHSGFTLRADEREVADIFEVPLAFLMDPARHERRLFRWEGGERMFYAMPYPREGGGQRFIWGATAGMLRNLYHLLAA

SEQ ID NO: 36098 - protein, 594 aa, Ralstonia metallidurans CH34
MASGANVTDNKQQTPQESDTLKRVWAYLKPEKRNFVLAIIAMGLVAASEGIIPKVVNDLLDKGFGGSYAGKLWHVPALLVGVALVRGLAQFASGYLLSQISNGVLLKMRMQMFDRMLHAPALFFHRNTAASLINAVIFEVNQVMQILTGVLITLVRDSLTVVALLIYLFYTNWKLTLVVAVLLPAIGFVMSKVNRRLRRLNREHQALTNTAAYVVEESVGGFKVVKLHGGEAYEMSRFEAMAERLRGYSMRMAVAGGLNQPVTAFLASLALSVILTIAMIQAQGNQTTIGGFTGFVMAMLLLISPLKHLADLNQPLQRGLTAAEMIFGLIDEPIEPQNGGLPLERARGDLVFDNVGFRYGDAARAALNHVSLRAAPGEVVALVGPSGSGKTTLVNLVPRFFDPTEGHILLDGQPIDRFALADLRRQIAFVSQDVVLFNDTVAANVAYGVHPREKIDMARVERALAAAYLTDVVKGLPEGLETNIGDNGMKLSGGQRQRLAIARAIYKDAPILILDEATSALDSESERQVQAALESLMVGRTTLVIAHRLSTIENADRIVVLEQGRVAEQGSHAELIGKNGLYAGLHRIQFASQA

SEQ ID NO: 36099 - protein, 582 aa, Ralstonia metallidurans CH34
MSHDTKPNDTPAASNFLRSIIDQDLATGTYAGRADKQGDPLPTVITRFPPEPNGYLHIGHAKSICVNFGLARDYAGRCHLRFDDTNPVKEDTEYVDSIIDAVHWLGFSWDSAQAGSTPHLYFASDYFDQLYKFAETLIERGVAYVDSQSAEQIAAMRGNFSEPGKPSPFRDRSVEENLKLFREMRDGKYADGEHVLRAKIDMTAPNIVMRDPVLYRIRHAHHHRTGDKWCIYPMYDFTHCISDAIENITHSLCTLEFENNRPLYDWVLEHLRDAGVFANPLPHQYEFARLNLTYAITSKRRLKQLVDEQRVTGWDDPRMPTIVGIRRRGYTPESIQLFCDRVGVSKADSWIDMSTLEGAVRDDLDARAPRSVAVLDPLKLILDNYPEGQSEECSAPVHPKQPEMGRRVFPLSRELWIEREDFNENPPKGYFRLFPGNKVRLRYGYVIECTGVDKDADGNVIAVHANYLPETKSGTPGADSVKVKGNIHWVSAPHACEAEVRLYDRLFNDPNPDAGGKNFLDALNPESKKVVTAYLEPGLRDAKPEDRFQFERHGYFVADRVDSQPGKPVFNRTVGLKDSWGK

SEQ ID NO: 36100 - protein, 773 aa, Ralstonia metallidurans CH34
MSSKTTGDAPQHAPNSPEAQLRLAALEYHRSPTKGKIQVTATKALSNQRDLSLAYSPGVAYACEEIHKDPAMAAEYTSRANLVAVVTNGTAVLGLGDIGPLAGKPVMEGKGCLFKKFAGIDVFDIELDARDPDKIVEIVAALEPTLGGVNLEDIKAPECFYIEQKLRERMNIPVFHDDQHGTAIISTAALLNGLKVVGKDIAKVKLAVSGAGAAAIACLDTMVSLGVNRENIYVVDSKGVIFQGRDANMEANKARYAQDTSARTLADIVKDADVFLGCSTAGVLTGDMVKTMADRPIILALANPEPEIRPEVAKAARPDCIIATGRSDYPNQVNNVLCFPYIFRGALDCGATKITEAMKLACVKAIAELAEAELNDAVAAAYGGRELKFGPDYIIPTPFDQRLIEKIAPAVAKAAEESGVATRPIKDLEAYRQQLTSYVYHTGMIMKPVFTAAKAAPKRVAYAEGEEERVLRAVQGVVDEGLARPILIGRPHVIQMRIDKAGLRLRPGVDFELINPEDDPRYRAYHEEYHALRGRDGVTPDMAKVALRRSNTLIGTMLMHMGDADALLCGTVGRFEAHLEHVRDVIGLAPGAKVFAAMNALMLEKYTLFITDTFVNDDPSAEELAAITQLAAEEIARFGLHPKVAMMSHSMFGSSNRPSARKMRDAAEILARVAPQLEVEGEMQGDAALVEDVRRHFLPGTKLAGSANLLVMPTLDAANIAFNLLKITGGQGVTVGPILLGAAKPVHILNPQATTRRIVNMTAVAVAECNATR

SEQ ID NO: 36101 - protein, 587 aa, Ralstonia metallidurans CH34
MNMPSAEFSHADSNSSSAREMIGAEILVNALAEEGVEYVWGYPGGAVLYIYDELHKQTKFEHILVRHEQAAVHAADGYARATGKVGVALVTSGPGVTNAVTGIATAYLDSIPMVVITGNVPTHAIGQDAFQECDTVGITRPIVKHNFLVKDVRDLAATIKKAFFIAATGRPGPVVVDIPKDVSRNSCKYEYPKSIDMRSYSPVNKGHSGQIRKAVALLQSAERPYIYSGGGVVLANASEELRELAALTGHPVTNTLMGLGAFPGTSKQFVGMLGMHGTYEANMAMQNCDVLIAIGARFDDRVIGNPSHFTAQARKIIHIDIDPSSISKRVKVDIPIVGNVKDVLQELISQIKTSDIKPKREALAKWWEQIEKWRSVDCLKYDRSSEIIKPQYVVEKIWELTHGDAFICSDVGQHQMWAAQFYKFNEPRRWINSGGLGTMGVGLPYAMGIKKAFPDKEVVTITGEGSIQMCIQELSTCLQYDTPVKICSLNNGYLGMVRQWQEIEYDNRYSHSYMQALPDFVKLAEAYGHVGMRIEKSSDVEPALREAFRLKDRTVFLDFQTDPTENVWPMVQAGKGISEMLLGAEDL

SEQ ID NO: 36102 - protein, 389 aa, Ralstonia metallidurans CH34
MAESNLAPLNPPPSRLPNVGTTIFTVMSALAAEKNAVNLGQGFPDFDCDPRIVDAVTHAMRTGHNQYPPMAGVPQLRQAIAAKIAKLYEHTYDWNTEITVTAGATQGLLTAILCAVHPGDEVIVLEPCYDSYLPAIELAGATAVPVTLEAPLFRIPFDKLAAAITPRTRMIMINTPHNPTGTIWREEDMQQLADLLAGTDILLLSDEVYEHMVYDGQQHESVARHPELARRSFVVSSFGKTYHVTGWKVGFVAAPAALSNEFRKVHQFNVFTVNTPVQYGLADYMADPAPYLNLSAFYQAKRDYFRAGLAGTRFKLLPSDGTYFQCVDYSAISDMSEADFSMWLTREIGVAAIPVSAFYSTPRESGVVRFCFAKKEETLKLALDRLAKL

SEQ ID NO: 36103 - protein, 195 aa, Ralstonia metallidurans CH34
MKSVDQAVLAQLFTEARTHNVWQDKHVDDALLKQIYEAMKFGPTAANGSPARIVFVKSAAEKARLVECVSAGNADKTRSAPVTAIIAFDRNFHDQLPKLFPHADARSWYAGNDEKIARDALMNSSLQGGYFILAARALGLDCGPMAGFDADKLNATFFPDGKWAVNFLVNLGYGEADKLFPRGPRLTFDEACRIV

SEQ ID NO: 36104 - protein, 406 aa, Ralstonia metallidurans CH34
MSTTPHFPIYMDYSATTPVDPRVADKMIPYLREQFGNPASRSHAYGWDAERAVEEAREQVAALVDADPREIVWTSGATESDNLAIKGAANFYSGKGKHIITVKTEHKAVLDTTRELERQGFEVTYLDVKDDGLIDMDVFKQAIRPDTILVSVMLVNNEIGVIQDVEQIGEICREKGIIFHCDAAQATGKVTIDLSTLKCDLMSFSAHKTYGPKGIGALYVRRKPRVRIEAQMHGGGHERGMRSGTLAPHQIVGMGEAFRLAREEMATENERIRMLRDRLWNGLSSMEEVYLNGSMEHRVPHNLNVSFNFVEGESLIMAIKDVAVSSGSACTSASLEPSYVLRALGRNDELAHSSIRFTVGRFTTEAEIDYTVELLKNKIGKLRDLSPLWEMFKDGVDLNSIQWAAH

SEQ ID NO: 36105 - protein, 338 aa, Ralstonia metallidurans CH34
MRDRILAVYDSLRPSERRLADYVARHGASVIRLTMPELADRAGVSQPTIARFCAALGYDGFKEFKLQFAQNVGGGTPFVHQDVEADDRPADIAGKVFDRTIATLMSVRNALSADQIEHGIRLLAGARRIEFYGCGNSGIVALDIQHKFFRLGIPTTAYSDPHVFSMSAALLRPGDVAVLVSNSGRTWDMLTAATLARSSGASVLALTHSGSPLARLADVCVFSDVEEDSEVYTPMTSRICHLVLGDVLAAGVALDRADSVAAGLQRAKAHLRERRIAGADPAPLGKTPAAASATTASEATSQSIKPSRAARRPTKSDSPANKTTKPAAHRGAGGASRQ

SEQ ID NO: 36106 - protein, 416 aa, Ralstonia metallidurans CH34
MALIVHKYGGTSMGSTERIKNVAKRVAKWHRAGHRVVVVPSAMSGETNRLLGLAKEISAQPDPRELDMLASTGEQASVALLAIALHGEGIDAVSYTGWQVPVKTDSSYTKARIESIDDERILGDLDAGKVVVVTGFQGIDGDGNITTLGRGGSDTSAVAIAAAIEADECLIYTDVDGVYTTDPRVVEDARRLDQITFEEMLEMASLGSKVLQIRSVEFAGKYRVKTRVLSSLTDPLMPLEQEMHSGTLITFEEESEMEAAVISGIAFARDEAKITVLGVPDKPGIAYQILGPIADANIDVDMIIQNQSVDGKTDFTFTVPRGDYQRALTILNDNVKGHIGAESVSGDPKVSKVSVVGVGMRSHVGIASKMFRTLSEEGINIQMISTSEIKISVLIDEKYMELAVRALHKVFELDQA

SEQ ID NO: 36107 - protein, 603 aa, Ralstonia metallidurans CH34
MRANLALTRWFPWLPRVTPLTLRADLVAGLLGAVLVLPQGVAFATLAGLPPQYGIYTAVIPCIVAALFGSSWHVMSGPTNANSLALFAMLSPVAFAGSPAYISLALAVTMLVGILQLAVGALRLGSLANFISPSVLLGFTCGAATLIGLHALKDLLGLAVPTGTSAFGVVRFLLDNLDTVSGSALIVGAVTLAVTLLVKRISRRAPFMLIGLLAGYGVALLLNSTGWGAARHVNVVGPIPSAIPPFHIPDINWRTVPDLLGIASALTIVALGQSISIAKAVALRSGQHIDANREFIGQGLSNIAGGFFSGYISCGSLNRSVPNFEAGAQTPLASVFSALLLVVLVMVSAPLLAQIPLAAISAMLLLVAWGLFDFQRLRRIARLSRTEFAIAVGTFVATLAIRLEMAVLLGTILSLVAYLYRTSRPAVRSLVPDADDPGRRFTPLDELRRPQPECPQLKLLRMEGAIYFGAVQYVTDRLHWLRTVNASQKHLLAMTKSMNFIDLAGAEMWEAELAERRAAGGNLYFHRPRTQVLETWEQTGFTAKLGDDHIFPTKRQALHTIIGSLSPDICAQCQARIFEECAQRPGAVPRSPQANASDAAASA

SEQ ID NO: 36108 - protein, 415 aa, Ralstonia metallidurans CH34
MGAADIIKQHLIDPEICIRCNTCEDTCPIDAITHDDRNYVVKADVCNACNACLSPCPTGAIDNWRTMLKGQAYTIEAQLTWDELPEEVPLPEAEIEAAAAAGQVIEEASRGSKSVAVQEVEASRHTSSRAPWSAAHPYVNLHGVREPVTATVAGNHRLTAEDASSDIHHIVLDFGNHFFPVLEGQAIGIVPPGTDASGKPHYIRMYSVASPRDGERPGYNNLALTVKRVDTDHDGNPVRGVASNFLCDLAKGDPVQVVGPFGSTFLMPNHREASVMMICTGTGSAPMRAMTERMRRNMDHFSGRRLLFFGARNRRELPYFGPLLKLPKDFLDIHFAFSRDPEVPRRYVQDAIREASAQVAALLADPHGHIYICGLKGMEEGVLDAFAEVCATSGQSWQDIEPRLRAEGRLHIETY

SEQ ID NO: 36109 - protein, 393 aa, Ralstonia metallidurans CH34
MTDIVIVSAARTAVGKFGGSLAKIPAPELGAIVIKAALERAGVKPDQVSEVIMGQVLTAASGQNPARQASRKAGLPDMVPAMTINKVCGSGLKAVMLAANAIVAGEAEIVVAGGMENMSAAPHVLPGSRDGFRMGDTKLVDSMIVDGLWDVYNQYHMGITAENVAKEYGITRQAQDEFAVGSQNKAEAAQKAGKFDEEIVPVLIPQRKGDPVAFKTDEYVRQGATLESMASLKPAFDKTGTVTAANASGLNDGAAAVVVMSAAKARELGLTPLATIKAYANAGVDPAVMGMGPVPASKRCLSRAGWEVKDLDLMEINEAFAAQALAVHQQMGWDQSKINVNGGAIAIGHPIGASGCRILVTLLHEMKRRDAKKGLASLCIGGGMGVALAVERN

SEQ ID NO: 36110 - protein, 394 aa, Ralstonia metallidurans CH34
MAREVVVVSGVRTAIGTFGGSLKDQAPTDMGALVVREALARAGVSGDDVGHVVFGNVIQTEPKDMYLGRVAAVNGGVSINAPALTVNRLCGSGLQAIVSAAQTILLGDADVAIGGGAESMSRAPYLAPMARWGARMGDAKLVDMMLGALHDPFHAIHMGVTAENVAKEYDISRQQQDEAALESHRRASAAIKAGYFKDQIVPVTLKSRKGDVVFDTDEHVRHDATMDDMTKLKPVFVKENGTVTAGNASGLNDAAAAVVLMERAEAERRGLKPLARLVSYGHAGVDPKTMGIGPVPATKIALERAGLTVKDLDVIEANEAFAAQACAVTKALGLDPAKVNPNGSGISLGHPIGATGALITVKALYELQRVQGRYALVTMCIGGGQGIAAIFERV

SEQ ID NO: 36111 - protein, 257 aa, Ralstonia metallidurans CH34
MPLTIGVPTETVHGERRLCVVPDVVKRYLGLGAQLLIQSGAGQPAHLRDEMFGDVRFAAKSEEVYSTADVVLCVQPPSVELIATMKPGSVLLGMLQPWSDATRAQQLMDKQITSFALELLPRITRSQSMDALSSQAAVAGYECALIAADHCPKFFPMLTYAAGTIRPAKVLVIGAGVAGLQAIATARRIGAMVEAYDVRAETREQIESLGAKFVDTGVSAEGTGGYARELTDEEKAKQAERLAKGGFKSKCNKNSMH

SEQ ID NO: 36112 - protein, 567 aa, Ralstonia metallidurans CH34
MSAPRERNGGQILVEQLRIQGTKRVFLVPGESYLPCIDALYDHQDAITPIVCRQESGAGYMAEAYGKLTGEPGVCFVTRGPGATNASIAVHTAFQDSTPMILFVGQVGNDFYEREAFQEIDYRRMFGQMAKWVAQIDRTDRIPEFVARAYAVATSGRPGPVVLALPEDTLWGRATVADMPRYERVHGAPTPVALDKLSTLLAGAKRPFLLVGGSGWTPTAMRQIEGFAERFGLPVGVAWRRLECFDNGHPNFAGHVGWGMVDALRQRIHEADLVIAVGTRMGEATTEGYTLVESPQPRQKLVHVYPDPDELGRVFRPTLPIAADVVSFAAAVAQLSPAQTVSREAMTAVTAANANFLAEQEPKDAPGALNLNRVACHVRDHVPDDACITVGAGNYALFAHAYHRFHGVGTSLAPTVGSMGYGLPAAISAKLENPSRTVVCYAGDGCFQMNLQELGVAMQYRLGIVILVFNNGMWGTIRAHQEREFPGRTIALGFDNPEFSQLVKAYHGHGEVVDRDEDFAPAFARALEFANREQLPALIELRYEPDGIAPGVTLSGIRAAALARQSA

SEQ ID NO: 36113 - protein, 303 aa, Ralstonia metallidurans CH34
MSKIGFIGLGVMGKPMALHLQTGGHAVHAHTRSGVPQALLDAGVKSCASAADVARQADVIFLMLPDTPDVARVLFGEQGVAEGLSPGKIVVDMSSISPIETREFAARIEKLGCDYVDAPVSGGEVGAKAATLSIMAGGKQDVFDKVLPLLQLMGKNITLVGNAGDGQVAKVANQVIVALTIEAVSEALVLAAKAGADPARVRQALMGGFASSRILEVHGERMIKRTFEPGFRIELHQKDLNLALSTAKALGLGLPNTASCQQLFNVCVAQGGAGWDHSGLVKAIEHMSSFAIGDKPTNAPTKG

SEQ ID NO: 36114 - protein, 559 aa, Ralstonia metallidurans CH34
MTANASSPVARTGGRVLVDQLRIHGTERIFCVPGESFLDVLDALHDQPAIDLIVTKHEGAAANMAEADGKLTGRPGICFVTRGPGATHASCGVHIAAQDSTPMILFVGQIAREHKGREAFQEVDYAAVFGSMAKWAAEIDDPARIPEMVARAFQVATSGRPGPVVLALPEDVLDNMVDCVDAAPYRAVAAAPRAEDAQALASALRAAERPLVIAGGANWTEATVRDFAAFVHAWDLPVACAFRRQDVLDNRDPHYVGHLSLGVNPKLAERVETADLIVAFGTRLGDIATDGYTMLEVPRPKQKLVHIHADSFELGRVYQAALPIHAGVEPGAAMLASLQPPAQVPWKSWTAGARADHEAFVTPPKPHSELSGVNMSAAISHLSSVLPEDSVVTNGAGNYAVWLHRFYAYKRPRTELAPTCGAMGYGLPAAIAAKLRHPEKTVVCLAGDGCFLMYPQEIATAAAHGVNLIVVVVNNRMYGTIRMHQERRYPGRQSGTTIVNPDFVGMARACGAWAERVEKTEDFAAAFERARNAGKPAVLELLTDPLQITPAMRVTEMPT

SEQ ID NO: 36115 - protein, 356 aa, Ralstonia metallidurans CH34
MTYQLTIEPLGQTIDIAEGQTVLDACLRAGVWLPHACGHGLCGTCKVQTVDGEIEHGEASPFALMDFEREEAKCLACCATPMSDLTIEADIDPEPDAQFLPLMDFTAEVTRIEALTPTIKGVFLRVEGVEGGDALRFQPGQYVNVWIGKEATPRAFSIASAPSADEIELNIRLVPGGSATTYVHEQLAVGERLQLSGPLGRFFVRKSDPRPLVFMAGGSGLSSPRSMILDLLESGDQRQIVLVHGARTADELYYRDAFEALTTRHDNFTYVPVLSAEAQGSAWAGERGYVHEAAGSHFGYDFRGWRAYLCGPPPMIESCIAALMQGRLFEKDIFTEKFLSAADASHATRSPLFRSL

SEQ ID NO: 36116 - protein, 493 aa, Ralstonia metallidurans CH34
MSHPHPHQHPVVEHDDLHRKLKARHLTMIALGGAIGTGLFVASGASIAQSGPGGALLAYCLIGLMVYCLMTSLGELAVHMPVAGSFVTYSALYVDEGFGFALGWNYWFSLAVTIAVELTAAQLVMQYWFPEVPGIYWSAGFLALMFALNAFSVKGFGEAEYWFAMIKVVTVVVFLCVGVLMILGILKGGPQSGWHNFTTGEAPFVGGLPGLFAVAMIAGFSFQGTETVGVAAGEAADPGRTIPRAIRQTFWRILLFYVVAILIIGVLIPYTDPNLLRNDVTDVGVSPFALVFQHAGLAFAAALMNAVVLTALLSAGTSSMYVSTRILYGLAVSQRAPRALAKLTPNGVPFNALLVTTGIGALCFFSSLFGDKAVYLWLLNTSAMTGFFAWLGIAVSHYRFRKGLLYQGYKVSDLAYRSPLYPFGPIFAGVLCLVIVGGQNYQAFTDIPGRWQEIVSTYIGVPVFLALWLGYRIVRGTRMIDYEDMPFELVKKD

SEQ ID NO: 36117 - protein, 862 aa, Ralstonia metallidurans CH34
MRIDKLTTRFQEALAEAQSLALGNDNQYIEPQHLLRALLAQDDGAARTLLSRAGVNVGGLQSALDAAIHRLPQVQGTNEVQVGRDLNNLLNATEKEAIKRNDQFIASELFLLAVSDDKGETGRIARENGLSRKSLEAAITAVRGGDTVNSADAESQREALKKYTVDLTERARAGKLDPVIGRDDEIRRAIQILQRRTKNNPVLIGEPGVGKTAIVEGLAQRIVNGEVPETLKNKRVLVLDMAGLLAGAKYRGEFEERLKAVLNDVAKDEGQTIVFIDEIHTMVGAGKAEGAIDAGNMLKPALARGELHCIGATTLNEYRKYIEKDAALERRFQKVLVDEPSVEATIAILRGLQEKYELHHKVEITDPAIVAAAELSHRYITDRFLPDKAIDLIDEAAARIKMEIDSKPEAMDKLERRTIQLKIEREAVKKETDEASRKRLELIEQEIIRLEKEYADLDEIWRAEKGAAQGAAALKEEIEKIKLDITRLQREGKLDKVAELQYGKLPELEGKLQAATKAEASEQKQQNKLLRTQVGAEEIAEVVSRATGIPVAKMMQGEREKLLKMEDRLHQRVVGQDEAVRLVSDAIRRSRAGLSDENKPYGSFLFLGPTGVGKTELCKALSEFLFDSEEHLIRIDMSEFMEKHSVSRLIGAPPGYVGYDEGGYLTEAVRRKPYAVILLDEVEKAHPDVFNVLLQVLDDGRLTDGQGRTVDFKNTVIVMTSNLGSHIIQSMAGEPQEAVKGAVWQEVRTHFRPEFLNRIDEVVVFHALDQKNIESIAKIQLKRLQVRLARMDMTLDVSERALEKIASAGYDPVFGARPLKRAIQQQIENPVAKAILEGRFAAKDVVPVDYVDGEFTFGRMVH

SEQ ID NO: 36118 - protein, 649 aa, Ralstonia metallidurans CH34
MQCSYPLARQLERSSALNNNLFQKAAIWLVIALVLFTVFKQFDKPRAQDSVTYSQFMDDAKNGKVSRVDVQGRNLVVSPKEGSKYTIISPGDIWMVGDLMKYGVQVTGKADDEPNVLVQALYYLGPTLLIIVFWFYMMRQMQGGGKGGAFSFGKSRARLIDENQNAVTFADVAGCDESKEEVVELVDFLKDPQKFQKLGGRIPRGVLLVGPPGTGKTLLARAIAGEAKVPFFSISGSDFVEMFVGVGAARVRDMFENAKKQAPCIVFIDEIDAVGRHRGAGMGGGNDEREQTLNQMLVEMDGFEANSGVIVIAATNRADVLDKALLRPGRFDRQVYVGLPDIRGREQILKVHMRKVPIGNDVDASIIARGTPGFSGADLANLVNEAALFAARRSKRVVDMQDFEDAKDKIYMGPERKSTVMREEERKATAYHESGHAVVAKLLPKADPVHKVTIMPRGWALGVTWQLPEHDKYSKYKDNMLEEIAILFGGRAAEEVFLNAMSTGASNDFERATKIARDMVTRFGMSDSLGAMVYVDTEQDGMFGKLSSKTVSEATQQKVDAEIRRIIDDQYALAKRLLEENRDKVEAMTNALMEWETIDAEQVNDIMAGRPPRPPRGAQGPNSGGNTPPGGSPVAPTNAPATARADETV

SEQ ID NO: 36119 - protein, 312 aa, Ralstonia metallidurans CH34
MTDSLPPQQDAAEPSGAVAFRCGTVAIVGRPNVGKSTLMNALVGQKISITSRKAQTTRHRIVGIQTTDDTQYVFADTPGFQTRHASALNRSLNRAVTSTLSSVDIVLFVVEAGYFGPDDEKVLSLLPKNVPVLLVCNKLDRIGEGRSEVMMPFLEQMGQRFPFREVVPMSAKTRDHIQRLLAIIRPYLPEGEPMYDVDAMTDRSERFLASEIIREKVFRWTGDELPYTSTVVIDKFETEGRLRRIFATILVERDAHKAMIIGNKGAKLKQISTEARLDMEKLFDGKVYLEMWIKVKSGWADNEAGLRAYGYE

SEQ ID NO: 36120 - protein, 334 aa, Ralstonia metallidurans CH34
MTDMKPSILVTRAIFPDVIERLAQYFDVDDNQEDLVLDSGALRERLAGKVGVLANAADRIDGELVGALPQLRAVCNMAVGYNNLDLPALTAAGIVATNTPDVLTETTADFGWALLMATARRVTEGEHYLRAGKWERWSYDMLVGMDVQGSTLGILGMGRIGQGLARRAAGFDMQVLYHNRSQLPDDVERSLNARYVSKAELLQQSDHLILVLPYSVESHHAIGAAEIAQMKPTATLINLARGGIVDDAALAAALRARKIFAAGLDVFEGEPSVHPDLLTVPNVVLTPHIASASEKTRRAMANLAADNLIAALDVGPQAGKPPTVVNPEVMARRR

SEQ ID NO: 36121 - protein, 424 aa, Ralstonia metallidurans CH34
MTQATSISRASVPQTSVSDTLKNAVTAAVLTAILTVPLLGLQLKLDGYKVVLEPHWRPVWIAVAVVFIFQLFKPMLTRARGAVKLPALPAMGAQRQRRAVWLLLAVGLVFPFLGSRGAVDVATLALIYVILGLGLNIVVGFAGLLDLGYVGFYAVGGYTYALLNQYFGLTFWECLPLAAGLAATFGFVLGFPVLRLRGDYLAIVTLGFGEIIRLLLNNLTSLTGGPDGVSGIPKPTVFGIELARSASVEGAKTFNDLIGIPYTGQHMVIFLYLLGLLLVGFTLFVTSRLIRMPMGRAWEALREDEIACRSLGLNPTRIKLSAFTLGASFAGLAGAFFAARQGLVTPESFTFIESALILAVVVLGGMGSQLGVILAAILLTVLPEVARDFAEYRMLIFGLVMVLMMMWRPQGLLPASRPHVELPR

SEQ ID NO: 36122 - protein, 634 aa, Ralstonia metallidurans CH34
MTQHDFRAEQPIASATDAFATPADAASPLDKLDAMLNADAAPAVEASENGFAKLGLDAAILRALAEANYNTPTPVQAQAIPAFLAGRDLLVSSQTGSGKTAAFMLPAIQRISEKPATHRPTEPAKRMKGKRPRPSPAQPSLLVLTPTRELALQVTEAAAKYGRHLRRIVCASILGGMPYPKQLAMLARMPDILVATPGRLLDHIEAGRIDLSALEMLVFDEADRMLDMGFADDIDAIVAATPASRQTLMFSATLDARIAQLASRQLRDPQRIEIAAARADHSNIEQRLHFTDDMSHKERLLDHLLRDASLKQAIVFTATKRDADSLAERLSDTGFSAGALHGDMTQGARNRTLTALRRGNLRVLVATDVAARGIDVPDITHVVNFDLPKQAEDYVHRIGRTGRAGRSGVAINLVNHGDMFQWRRIERFTNNRIDASVIEGFEPRRSPKPRSNFGGKPGGRDGFRGNGGTGGGYRGNNGSGGYRGNREGSGDRNFGERRFSSDNRGFGDRAPRPFGDDNRGGFGDRGERGFGDRSNGNSNGGYRGQGQGQGQGQAQQRSFGGERSFGNRDFAQRDGNRDATQRDGNRSFGGNRDGQRDGNRSFGDRSFGDRKFGDRGGDRGGFGGQRNSRSRYER

SEQ ID NO: 36123 - protein, 556 aa, Ralstonia metallidurans CH34
MLLTSQAPILASVRDDRARAVMVESKSLIFRAIHPLSGLSSRRVSDCDGFAPCTDTSTMTMTTTQDQAPAAEQTFESFGLDPRILRALTEQGYTKPTPIQAQAIPVVLLGKDVMGAAQTGTGKTAGFALPIIQRLLPLANASASPARHPVRALMLTPTRELADQVYDNVARYAKHTDLRSTVVFGGVDMNPQTDALRRGVEILVATPGRLLDHVQQKSVNLSQVQMLVLDEADRMLDMGFLPDLQRIINLLPAQRQTLLFSATFSPEIKKLASSYLKQPVTIEVARSNSTNENVRQVVYQVQDGHKQAAVVHLLKQRANEQQSRQCIVFVNSKIGCSRLARHLEREGINAAAIHGDKTQTERMQTLDGFKNGTIDALVATDVAARGLDIPAMPCVINFDLPFSAEDYVHRIGRTGRAGASGDALSIFVPGNDDRLLADIEKLIKRSIPRGSLDGFDPTGERARQEDSDRRRARTEVRRVRDNGEGEEQQRRRRTEPNGRQAFRPSDDPFFSRPYEPSGSYTPAPKTEEQLAAALTRGRQAPKRPVAALLGGVPRKS

SEQ ID NO: 36124 - protein, 393 aa, Ralstonia metallidurans CH34
MDLQRLATASRLANIDAFHVMELAKQAAELERAGRHIIHMGIGEPDFTAAAPVIHAAEAAMRRGVTQYTGALGIHALREAIAGYYKTSYGIDVPARRVIVTAGASGALLLACAVLVEIGAEVLMPDPSYPCNRHFVAAFDGHAKMIPSGPEERFQLTAAQVIEHWGENTRGVLLASPSNPTGTSILPDELKAILAEVRKRQGFAILDEIYQGLSYDAPPVSALSLDDNVVTVNSFSKYFNMTGWRLGWLVVPDSLVPAFEKVAQNLFICASAVAQHAALACFTPEALAIYDERKAEFRRRRDAIVPALEALGLRVPVKPDGAFYVYANCRHVNHPAAGNADRLTQAILHDAGVVMVPGTDFGPHTANDYIRISYATSMQNIEEAMQRLHHFLR

SEQ ID NO: 36125 - protein, 560 aa, Ralstonia metallidurans CH34
MYQYDQYDQRIVQERVAQFRDQVRRRLSDELTEEEFLPLRLQNGLYMQRHAYMLRVAIPYGLLASKQMRMLAHIARTYDRDYGHFSTRQNIQYNWMDLERVPDVLDDLASVEMHGIQTSGNCVRNITTDQFAGVAPDETVDPRVLAELLRQWSTFQPEFAFLPRKFKIAISSSADDRAVVQMHDIGIYAYKNAAGETRLRILAGGGLGRTPILGTIIKEDLPWQHMLTYVESAIRVYNRYGRRDNKYKARIKILVKAIGAEKFAAEVEEEWKFSKDGPGTLTQAEFDRVAQYFQPPAYEKLPDTDASFEKHLLENKAFARWVNRNVHAHKVPGYASVTLSTKPGPVSPPGDATSAQMDTVADFADRYGYGELRVAHEQNLVLPDVKKRDLFALWEDAKKAGLATANIGLLTDIIACPGGDFCSLANAKSIPIALAIQERFDNLDYVYDLGDISLNISGCINACGHHHVGNIGVLGVDKDGAEWYQVTIGGAQGNDTALGKVIGPSFSAHEMPDVVSRIIETFVANRVGDERFIETVGRIGIAPFKERVYADKQREERAEA

SEQ ID NO: 36126 - protein, 69 aa, Ralstonia metallidurans CH34
MASGIVKWFNDAKGFGFIKPDDGEEELFAHFSAIQMSGFKTLKEGQRVVFEIVQGPKGKQATNIQDANQ

SEQ ID NO: 36127 - protein, 648 aa, Ralstonia metallidurans CH34
MGKIIGIDLGTTNSCVSILEGNTPKVIENSEGARTTPSIIAYMEDGEILVGAPAKRQAVTNPRNTLYAVKRLIGRKFEEKEVQKDIGLMPYAIVKADNGDAWVGVRDQKLAPPQVSAEVLRKMKKTAEDYLGEPVTEAVITVPAYFNDSQRQATKDAGRIAGLDVKRIINEPTAAALAFGMDKNEKGDRKIAVYDLGGGTFDISIIEIADVDGEKQFEVLSTNGDTFLGGEDFDQRIIDYIIGEFKKEQGVDLSKDVLALQRLKEAAEKAKIELSSSQQTEINLPYITADASGPKHLNLKITRAKLEALVEELITRTIEPCRTAIKDAGVKVSDIDDVILVGGMTRMPKVQEQVREFFGKEARKDVNPDEAVAVGAAIQGSVLSGDRTDVLLLDVTPLSLGIETLGGVMTKMINKNTTIPTKHAQVFSTADDNQPAVTIKVYQGEREMATGNKMLGEFNLEGIAPAPRGTPQIEVSFDIDANGILHVGAKDKATGKENRITIKANSGLSEDEIQRMVKDAEANAEEDKRARELADARNQADALIHSTRKALGEYGEKLEAGEKEKIEAAIKDLEDAARGGDKAEIDAKVNALSEASQKLGEKVYADMQAQAGEGAAAGAGAAGGAQQQAQPQDDNVVDAEFKEVNDKK

SEQ ID NO: 36128 - protein, 495 aa, Ralstonia metallidurans CH34
MEGDVEWRHSLAYRAIRPEPETRMNHPTPATALARRPFPSELADALAARFGDRFTTSVGVREHHGRDESPFPPELPDAVVFAHSTEEVAELAKLCNTHGVPLIPYGAGSSLEGHLLAVAGGISLDLSQMNRVLAVHPEDLTVTVQPGVTRKQLNQEIKDTGLFFPIDPGADASLGGMCATRASGTNAVRYGTMRENVLALTVVTADGRVIRTGTNARKSSAGYDLTRLFVGSEGTLGIITEVTVRLYPQPEAISAAVCAFPSMGDAVRATIQTIQLGVPVARVEFVDALAIRAINRHDNLTLPETPHLFFEFHGTEAGVREQAETVQDIAAEHGGQGFEWATRPEDRSRLWNARHTAYFAMLQLKPGCKSVTTDVCVPISRLADCVTETERDLNASSLPCPIVGHVGDGNFHVAILVDPDKPEEMAEAEDINRRIVQRALAMGGTCTGEHGVGLHKMGFLVQEHGEDALDLMRAIKDALDPNHILNPGKIFSATR

SEQ ID NO: 36129 - protein, 401 aa, Ralstonia metallidurans CH34
MVRRTRYTKGEDVCPTNQIRRHQKEKWTMHIGIPLETRAGEARVAATPETVKKYVAQGHQVTVQAGAGIRASIPDAAFEAAGARIGSAADALGAELLLKVRAPDDAERAQIKPGAVLVGMLNPFDIENNARMASAAITAFALEAAPRTTRAQSMDVLSSQANIAGYKAVLEAAHHYQRFMPMLMTAAGTVKAARVLILGAGVAGLQAIATAKRLGAVIEASDVRPAVKEQIESLGAKFLDVPFLTDEEREIAQGVGGYARPMPADWMRRQAELVHQRATQADIVITTALIPGRRAPVLLQEETVKQMKPGSVVVDLAAAQGGNCPLTVADEVVERHGVTLIGHTNLAGMVAADASALYARNVLDFLKLIIDKDARYTLNLEDDIVAACLMCKDGQVIREAA

SEQ ID NO: 36130 - protein, 327 aa, Ralstonia metallidurans CH34
MNHRKIVVTQPVHEEVLRKLQAEGEVIMNPGPDPWSPSQLREYLVDADAMMAFMTDSVTKESLLNAPRLKTISCALKGYDNFDLRACAQAGVSVTFVPDLLTEPTAELAIGLAIAAGRNVLQGDAATRAGYSGWRPALYGTGLHGSVASVIGLGKVGQAILARLAGFGCARLLGVDPSVRLDQVELVTLDEAVSTSDYVFLAVPLVSDTRHLVDSRMLQLSKKGQILVNVGRGSVVDERAVVDALANEQLGAYAADVYEMEDWLLPDRPREIHPGLTNNARTVLTPHIGSAVRRVRFEIEMRAAENLVRSLRGESLSDVAVEASAAA

SEQ ID NO: 36131 - protein, 365 aa, Ralstonia metallidurans CH34
MKFIDEARIEAIAGNGGNGSASFRREKFVPFGGPDGGDGGRGGSVFAQADRNINTLIDFRYAKKHVARNGENGRGSDCYGAAGEDVTLRMPVGTLISDMDTGEVIADLTEHGQLVCLAEGGMGGWGNLHFKSSTNRAPRQQVDGKPGERRMLKLELKVLADVGLLGMPNAGKSTFISHVSNARPKVADYPFTTLHPNLGVVRVDHEQSFVVADIPGLIEGAAEGAGLGHQFLRHLQRTGLLLHIVDIAPFDENVDPVAEAKAIVNELKKYDETLYDKPRWLVLNKLDVVPEEERAARVKDFVKRYKWKGPVFHISALTGEGCRELVYAIKDHLAALKAEEAAALAEPDIRLDDRLHNVDRDDSKA

SEQ ID NO: 36132 - protein, 103 aa, Ralstonia metallidurans CH34
MYAVVKTGGKQYKVAAGEKLKVEQIPADIGAEITLDQVLAVGAGDQIKFGTPLVSGASVKATVIAQGRHDKVKIFKMRRRKHYQKRQGHRQNYTELRIEAIVA

SEQ ID NO: 36133 - protein, 117 aa, Ralstonia metallidurans CH34
MPAWRRAQPERISIMSDVQQKIDQIVKGSPVVLFMKGTAQFPMCGFSGRAIQILKACGVDAPTTVNVLEDEGIRQGIKEYANWPTIPQLYVNGEFIGGSDIMMEMYQNGELQSLLKA

SEQ ID NO: 36134 - protein, 361 aa, Ralstonia metallidurans CH34
MTPQFHPLRVAQVRPETSDTVSIAFDVPDALRDAYRFTQGQFLTLKAPVGGNDVRRSYSICSGVQDYAESGELRVAVKLVDDGVFSTWVHDNVEAGQTLDVMTPDGRFHVPLDPAASRHYVAFAAGSGITPVLSLIRTTLAVEPNSRFTLVYGNRSVDTIIFSEALEDLKNQYLSRFTLYHVLSRQPQEVDLLHGRLDRERVSRFLDALIPIDDIDAAFVCGPASMIDEVEEALKAAGLDPHRIHAERFGVPLGPRREIPVSLEGQTGTAELVVVLDGKQHKMRLPLGNAKVLDTALAAGLDLPYACKGGVCCTCRAKVLEGEVEMEKNYTLEPWEMEKGFVLTCQARAVTPRVVVSYDER

SEQ ID NO: 36135 - protein, 429 aa, Ralstonia metallidurans CH34
MSSAGFIVCKNMHFTCMIQGVLLMLSAASRPYIDASVPVLREHGLAITTHFYREMFAARPELKRIFNMGNQANGSQQQSLASAVFAYAANIDRADVLAPVVERIVHKHVAVGLTPAHYPIVGKYLLEAIAAVLGDAATPPLLAAWDEAYWLLAGELIAAEARLYERHGVAAGELLRVRVVNREQEGDQVVALTLAAEDGSPLRDFAPGQYISVEASFADGRRQLRQYSLSGERGLPTWRISVKREDGASDAPAGTVSNWLHENAQVGTTLHVSTPWGDFAPELDSRQPIVLMSAGIGVTPMVSVLRTLAHENPHRPVLFAHAARHGRQHAHRRDLAWARERMPNLRTHVSYETPQSVDASGRDYDHAGTMPVEALLKSGDNAAFNDARFYLCGPLGFMQEQRRALIASGVPVGHIHREVFGPDLLDDIL

SEQ ID NO: 36136 - protein, 307 aa, Ralstonia metallidurans CH34
MANQRNVGFIGLGIMGAPMAGHLRAAGHTLFVHDVNPAPQFLVDAGVTVCTSAEEVAKRADIVIVMVPDTPHVEAVLFGEKGVAAAFKAAGKEASYSKIVVDMSSISPIATKDFAARINKLGASYLDAPVSGGEVGAKAATLTIMVGGPAEAFDQVKPLFELMGKNITLVGGNGDGQTTKVANQIIVALNIQAVSEALLFASKAGADPAKVRQALMGGFAASRILEVHGERMVKRTFDPGFRIELHQKDLNLALQGAKALGVSLPNTSTAQELFNACAANGFGKLDHSALCRAIEIMSNHEIAKGAK

SEQ ID NO: 36137 - protein, 170 aa, Ralstonia metallidurans CH34
MSDKGTDTKDKEKKAGKKKTASDRIEVRQSGVHGKGVYAIGQIAEGERVIEYKGEHISWKEALKRHPHDPNDPNHTFYFSLDDGDVIDAKFGGNRARWINHACDPNCEAREKKGRVFIHALRDIEPGEELFYDYGLVIDARYTKKLKQEYECRCGSPKCRGTMLAPKDKK

SEQ ID NO: 36138 - protein, 555 aa, Ralstonia metallidurans CH34
MDIKRTILWVIFSMSLVLLYDNWQRANGHASMFFPSANTQQAAPAGAGGATPQADVPKANATNAAPGTVPAAPQAAAQPVGEKVTVTTDEVRAEIDTAGGILSRLELLNEHEKDGAPVVLLERDVNRTYLARSGLIGGDLPNHTTVFTVAPGARTLAPGQDKLDVVLTAEKNGVKFVKTYTFHKGSYVVDTRFDVTNTGTAAVSPTLYLELARDGSKVEKSQFYSTFTGPAIYTNADKYHKLTFEDIAKGKATVPAATDNGWVAMVQHYFASAWIPQTGKQHSFYAEQIDPNLYRVGIQQPLGQLAPGATVSTDARLFAGPQEERMLEQITPGLELVKDYGWLTILAKPLFWLLEKLHGFLGNWGWSIIGLTVLIKLVFFPLSAASYKSMGKMKDLQPRMTAIRERHKGDPQKMNQEMMALYRTEKVNPLGGCLPIVIQIPVFIALYWVLLSSVEMRGAPWLGWIHDLSVPDPFYILPIVMAVSMFVQTRLNPTPPDPVQAKVMMIMPLVFSFMFFFFPAGLVLYWVVNNILSIAQQWQINRMLGKGKTAAVAKS

SEQ ID NO: 36139 - protein, 400 aa, Ralstonia metallidurans CH34
MSEAFIVDAIRTPIGRYAGSLSGVRADDLGAVPLKALMARNASVDWSAIDDVIFGNANQAGEDNRNVARMSALLAGLPDAVPGATINRLCGSGMDATGTAARAIKAGEANLMISGGVESMSRAPFVMGKATSAFSRDAQIFDTTIGWRFINPAMRAAYGVDSMPETAENVATDYKIGREDQDLMALRSQEKASRAQADGTLAQEITPVTIPQKKGDAIVVDRDEHPRATSMEALAKLRGVVRPDGTVTAGNASGVNDGACALLLASEAGLKQHGLKPRARIVGMATAGVAPRVMGIGPAPATQKLMKQLGMTLDQIDVIELNEAFAAQGLAVLRQLGIADDDKRVNPNGGAIALGHPLGMSGARLVTTAMYQLERTGGRFALCTMCIGVGQGIAMVIERV

SEQ ID NO: 36140 - protein, 586 aa, Ralstonia metallidurans CH34
MLSDGRNPGASRKARIPNSWLRWLPGVAMARDYQASWLPRDLTAGLVLTTMLVPVGIAYAEASGVPGVYGLYATIVPLLAYAVFGPSRILVLGPDSALAAPVLAVVVQMSGGDPARAIAVASMMAIVSGLFCIVMGLLRLGFITELLSKPIRYGYMNGIAFTVLVSQLPKIFAIRVEDTGPLRELVLLGQALVAGQVNWYSAAVGAGSLVLILALKRFERVPGILIAVIVATLCVIMFDLDQMGVKVLGSIPQGLPAFAVPWASGLDFVKIVAGGCAVAMIAFADTSVLSRSFAARHHHRVDPNQEMVGLGAANLAAGFFQGFPISSSASRTPVAEAAGARTQLTGVVGALAVAALLVVAPDLMRYLPNSALAAVVIAAALGLFEFADLKRIYRIQQWEFWLSMVCFVAVAVFGAIPGIGLAVVLAIIEFLWDGWRPHYAILGQVEGLRGYHDLERYPHGKRIPGLVLFRWDAPLFFANAELFQERLQEAIDESPAPVYRVVVAAEPVTSVDVTSADMLRELSRTLGEHGIALHFAEMKDPVRDKLRRFELMDVIGEDRFHPTVGSAVDDYVGRQGDWPEAWGRNE

SEQ ID NO: 36141 - protein, 302 aa, Ralstonia metallidurans CH34
MKPVTLIGAPTDVGASIRGASMGPEALRVADIAGALVRNGLDVTDLGNLVGPGNPNLPPTDGVRHLPEVVAWNRLVMDATYQALATGQLPLLMGGDHCLAIGSVNAAARYCREQGKKLLVLWLDAHADANTGSTSPTGNTHGMPVACLCGDGPAPLVSLGGVTPATSPRNIRQIGIRSVDAEEKKRLRELGLTVYDMRYIDENGMRATMEQALAGIDGDTHLHVSFDVDFLDSQIAPGVGTAVRGGPTYREAHLALEMIEDTGALGSIDVVELNPARDVHNQTAELVVELLESLFGKSTLLR

SEQ ID NO: 36142 - protein, 67 aa, Ralstonia metallidurans CH34
METGTVKWFNDAKGFGFITPDAGGNDLFAHFSAIEGNGFKSLKEGQKVRYVKAMGQKGEQATKIQAI

SEQ ID NO: 36143 - protein, 312 aa, Ralstonia metallidurans CH34
MKKQPVVLVTGNDLAPQALELLKDFEVRFAGKSCTEDVLLALAKETDPVAIIVRYGRIGASIMDAAPSLKVISKHGSGIDVIDQKAAAERGIAVKAAVGANAAAVAEHAWALILACAKSVPHLNDRMREGYWDKSIHKSIELNGRTLGIVGLGEIGRRVAVTGVVLGMRVIAFDPYANAAPDGVELVNDLHDIYRNADVVSLHCPLTESNRGMLHRETLGLFKNGAILINTARGGLVDEPALAEALTNGMLYAAGLDSFAVEPMTAPHPLQQIPNAILTPHIGGVSDAAYVSMGVGAATNVLAVLGSVTADG

SEQ ID NO: 36144 - protein, 305 aa, Ralstonia metallidurans CH34
MDQSRRYRTGIDSADDAGGRHHTCRPRIGNSPKIEQMAVAMSTEIPECRAHIPPVLRPHADAVPVTPGPDTSLLIGAVLRQAAWAAACQPSTVQAFARGGVVRHMKRHAIVVRRGDPVRRLGIVLSGILQAGVHACNGKRMTSAYMASGQLFNLVPFLDGGMASKDFVAHTDLTVCWLNKSLVETAMSTDAELQRAFIQVLCARSRQCLSDRAGLLLLTLRQRCAEVLLMLAADYGIPRQEGVSLTLRMSQAEFSDLVGWSRPKVNQELKRMEAESLIQISYSHILILDMARLRTDVAGEGGGPY

SEQ ID NO: 36145 - protein, 291 aa, Ralstonia metallidurans CH34
MRVAFLGLGVMGYPMAGHLAAKGHDVTVYNRTAAKAERWVQAFGKHGGKQAATPALAAVDCDIVCACVGNDDDLRAVMTGPDGAFQHAAPGTIFVDHTTASASVARELHEAARERGCHFIDAPVSGGQAGAEQGILTIMCGGDPEAFQRAEPVIAAYARAVTRIGESGAGQLAKMVNQISVAGLLQALSEAIAFGEHAGLDMRVVLDVISKGAASSWQMENRGPTMLQSKFDFGFAVDWMRKDLGLCLDEARRNGATLPVTSLVDQFYADLQQMGSSRDDTSSLIKRLRRS

SEQ ID NO: 36146 - protein, 432 aa, Ralstonia metallidurans CH34
MVRCAHARPAYRILHRDAPCLSNSPAFSPTIMASALLLENIHASAQQLLGRHQIDLATQGKALAGDALLAAVRDHELLGIRSATTLTAEAFAKAQRLLTVGCFCIGTSQVDLGAAAHAGIPVFNAPFSNTRSVAELVIGQAIMLMRRIPEKSRAAHSGQWQKTAKGAFEIRGKTMAVIGYGNIGAQVGILAEAMGMRVVFYDIRPRLSIGGAMPVHSLEDALSQADVVTLHVPATPQTRNLMDAKALAAMRHGSILINASRGTVVDIPALAQLLDNGQLAGAAIDVFPEEPRSNADPFVSPLQGKPNVILTPHVGGSTEEAQENIGVEVATKLVNFLETGATLGAVNLPQIQPAPQQAPARVLNIHYNRPGTLSHFNQALAEIGANIVAQQLQTEGDIGYAITDISLVPPAGWAEALMKDDAFIRTRVIVAP

SEQ ID NO: 36147 - protein, 304 aa, Ralstonia metallidurans CH34
MPSIVSVSSLQRLLAGIALAAALVPAAHAQNPQSPVLDRIRDSGTITLGYRESALPFSFGDDKGQPAGYAVDLCLRVAEAAKEKLGLKTIKVRWLPLTPQNRVPAVVNGLVDLDCAPNTNTLERQKQVAFSVSHYVSTVRMLVRADSGIKSFDDLRGKTVVTSAGSTGDRHVRRLKAEYGYRDVYAKDHGESFLLLETGRAQAFVMDDVLLAGLRAKSKDPSQYVIVGPALSVEQNALMLSKADPEWKRLVDQTLAKTFTSPDVAAMQKRWFQQPIGTRGTNLALAPSTEVLQAWKHPSDVVTE

SEQ ID NO: 36148 - protein, 339 aa, Ralstonia metallidurans CH34
MEHTIALQFEDGVTRFITCGDNETLSDAAYRQQINIPLDCRDGACGTCRGLCESGHYDLPESSYIEDALTAEEAAKGYVLACKTRPRSDCVIRVPASSAACKTGVTRFEGAIAAVAPLSDSTIGFSIDLDDPAALSFLPGQYVNVEIPGSGLTRAYSFSSPPGASQAAFVVRNVPQGRMSGFLAGEAQTGQRMAFSGPFGSFYLRSVTRPVLFLAGGTGIAPFLSMLDVLAASGSTHPVRMVYGVTHDIDLVATERLEAAAASIDGFTYRTCIADAASTHERKGYVTTHVDPTWINHGDVDIYLCGPVAMVEAVRDWLRDAGITPANFYYEKFSASAEA

SEQ ID NO: 36149 - protein, 780 aa, Ralstonia metallidurans CH34
MPQTNAPASSGSCPIDHSALRAPNGCPISHQAAAFDPFEDGYQQDPPEYVRWSRAQEPVFYSPKLGYWVVTRYDDIKAIFRDNITFSPSIALEKITPTGEAANAVLASYGYAMNRTLVNEDEPAHMPRRRALMEPFTPAELAHHEPMVRKLTREYVDRFIDTGRADLVDEMLWEVPLTVALHFLGVPEEDMDLLRQYSIAHTVNTWGRPKPEEQVAVAHAVGNFWQLAGRILDKMREDPSGPGWMQYGLRKQRELPEVVTDSYLHSMMMAGIVAAHETTANASANAIKLLLQHPDVWREICEDPALIPNAVEECLRHNGSVAAWRRLVTRDTEVGGMSLAAGSKLLIVTSSANHDEHHFADADLFDIHRDNASDQLTFGYGSHQCMGKNLARMEMQIFLEELTSRLPHMRLAGQRFTYVPNTSFRGPEHLWVEWDPARNPERTDPTVLAPRDAVRIGEPTGGTTGRTLIVERVETAAQGVSRIRLVSPDGRALPRWSPGSHIDIECGHTGISRQYSLCGDPADTSAFEIAVLREPESRGGSAWIHASLRAGDKLKVRGPRNHFRLDETCRRAIFIAGGIGVTPVSAMARRAKELGVDYTFHYCGRSRASMAMIDELRALHGDRVRIHAADEGQRADLAQVLGAPDANTQIYACGPARMIEALEALCATWPEDSLRVEHFSSKLGTLDPSREQPFAVELKDSGLTLEVPPDQTLLATLRAANIDVQSDCEEGLCGSCEVRVLAGEIDHRDVVLTRGERDANNRMMACCSRAAKGGKIVLGL

SEQ ID NO: 36150 - protein, 474 aa, Ralstonia metallidurans CH34
MGLRSQSRHPSGDSLKNLQRNLSARHIRFLALGSAIGTGLFYGSASAIQLAGPAVILAYIVGGAAVYMVMRALGEMAVREPVTGSFGRYASEYLGPLAGFLTGWTYILEMIIVCLADVTAFGIYMGFWFPEVPQWIWVLGIVMLICGLNLCNVKVFGELEFWLALVKILAIAAMIIGGTLILFLGVKMNGEHSPGLTNLWAHGGFLPHGAGGLIASLAVVMFAYGGIEIIGITGGEAQNPEKVIPRAINAVPARILLFYVLTMTVLMAIFPWTGIGSQGSPFVQIFSGLGIKSAAAVLNLIVISAAISAINSNIFGAGRMMYGMAEQGQAPRLFATTSRHGVPWVTVLAMAAALLGGVVLNYLIPEQVFVIIASIATFATVWVWLMILLSQVAMRRRLSAEEVRALKFKVPLWPVGPALAIAFMLFVIGVLGYVEDTRVALYVGAGWVVLLSLAWFLRAKPKADALLARETSVS

SEQ ID NO: 36151 - protein, 392 aa, Ralstonia metallidurans CH34
MQQAFIIDAIRSPLGRSKPGSAFTELHATELLAQVLSQLVRRNDLDPGLVDDVITGCVTQAGEQSAGVGRVAWLAAGFPEHVPATTIDRKCGSSQQAVHFAAQGIMAGAYDIVIACGIESMSRVPMGAARIGQNPYGPSFEERYAPGLVGQGVSAELVAAKWELSRHDMDSYSARSHQRAAATQAAGGFKREIVGIQTVNGLVEQDETIRANTTVERLATLESPFRNDELSARFPQIGWNVTAGNASQISDGAAAILIVSERMATKLGLKPRARFVGFDVIGANPLEMLTAPIPATQRVLAKTGMTLEQIAHYEINEAFASVPMAWQKTMKADGARLNPRGGAIALGHPLGASGVRLMTTMLHALEDSGERFGLQSMCEAGGMANATIIERV

SEQ ID NO: 36152 - protein, 126 aa, Ralstonia metallidurans CH34
MFIDRGAVYLYKYDRRIFKRNLEALGVYLGSTTFSPCFLLDRHASSAISARREFLRNFYMETGTVKWFNDSKGFGFITPDAGGDDLFAHFSEVQGNGFKSLQEGQKVRYVAGVGQKGPAATKIEPI

SEQ ID NO: 36153 - protein, 475 aa, Ralstonia metallidurans CH34
MRQQQGFDAIVEREQGLHRGLSTGQLSMIAIGGAIGTGLFLGSGFAIGFAGPSVLVSYAIGALIALLLMGCLAEMTVAHPTSGSFGANAEHYIGPLAGFLVRYAYWSSIVFAVGTEVTAIAVYMKYWFPMVPGWYWIVGFSAALIGINATSVKVFGAVEYVFSMLKIVAIVGFILLGAYVVTRAPTGSGIGLANYTAHGGFFPKGMWGTWVAVIVSIFSYLSIEMIAVAAGEARDPETAITRAFRATMVRLVFFYLLTLALMLMIVPWTAAGAGESPFVRVMAATRVPGAAAVFNFVILVAALSAMNSQLYITTRMMFSLSRAGYAPKALGQVNGRGVPMTALLLSTVGIAFAVVLNVVYPDASFMLMMAISMFGAMFTWLMIFITHLFFRRQHRGRPLAFRMWGFPVTTLLGAGLMFATLVTTWFTPEFRMTLVAGVPFMLALSAAYWLWYRKRGGAAQGDGEDAGRAEVRNSW

SEQ ID NO: 36154 - protein, 317 aa, Ralstonia metallidurans CH34
MSLACMKDEGEVIVLTRLPLDQDWLRAHAPRYRFVPWTAVDEAQRVQARAVLTNGSTGLTGAEMAALPALELVASFGAGYENIERDAARMRGVRVCHAPDTNSQVVADHALAMMLAWSRGIAMLDRGLKAGQWDALRAPRPGVRGKTLGIVGLGNIGQRLAALAEAVGMRVAYLRRSGALQPNRTPYGDVRSLAAASDVLALTCPGGPATRHLVDAEVLRALGPDGLLVNVARGSVVDTEALVQALRRGELGGAALDVLEAEPLVPEAFREMDQVILTPHMAGRSPETRVAQHEALLRNLDGWFRHAAPAHPVDLAG

SEQ ID NO: 36155 - protein, 197 aa, Ralstonia metallidurans CH34
MSAPVASDVLDTLFLTARSHNGWLDGDVSDATLTRLYALVSQGPTSANCSPMRLVFVRSDAARARLLPTLAPANVDKVRHAPVTAIVAYDTAFHAFGETLFPHRPAMFDTFAADPALAAETAMRNGSMQGGYLILAARALGLDCGPLSGFNADAVNRAFFPDGRWRVNFLCNLGKGDPARLFAKLPRLPFDQACRIE

SEQ ID NO: 36156 - protein, 501 aa, Ralstonia metallidurans CH34
MSTDTLRYFDYAATTPADPRVMEAMFGCLGAAGVFGNPASNSHAAGLKAKDLVEQARAQVAALIGAEPSEIVWTSGATESNNLALKGFFDREPTRRHLVTSKLEHKAILDTASYLERLDVSVSYLLPDPSGEISQAAVEAACSHHTGLVSLMMVNNEIGTLTNIAEISRLVHAAGALLHVDAAQAVGKTAIDVKAMGVDLLSMSAHKVYGPKGIGALYVSREVASRIACQMHGGGHEQGLRSGTLATHQIVGMGTACELARTEMASDNERIAQLSERLLSGVRATGAITQNVSSAVRIPHTLSLTVELPNFLPSMLADNLAISSTSACNSAAGKPSHVLTCIGLGKDSAERTVRLSLGRFTTEADVDFAVDCFRGAIERCLEVGAGRQDMQIRQLSNDVSVAPQLSGADVRAAHAIGFRSIVCNRHDGEAAGQTQFAKIAEVASSLGMAAHYLPVESGDVTVEAAAAFGLLVAELPKPVLAYCRTGTRSATLWNLASSRQG

SEQ ID NO: 36157 - protein, 312 aa, Ralstonia metallidurans CH34
MKPRLLQHGRLPEKTEAQLAEQFDIHPFWAETDPAGYLAKHGGEFVAMTTRAAIGVDAAMLAALPNLRVISSFGVGTDKLDLETARARGIAVGYTPDVLNDCVADTAFALLMDAARQVSAADRFVRRGEWPKGPYPLTTRVSGKRLGIVGMGRIGRVIARRSIGFDMEVRYFGRKPQDGVDYGFEPSLEALASWADFLVVATSGGPSTRHLISASVLEALGPQGYLINIARGTVVDEAALVSALTDKRIAGAGLDVFEREPHVPEALFALDNVVLLPHVASGTHETRAAMADLVFDNLQSFFATGAVLKSAV

SEQ ID NO: 36158 - protein, 265 aa, Ralstonia metallidurans CH34
MKWPGGKTQLLPTLRKLLPVGNRLVEPFLGGASVFLGTDFPNYLLLDAHVDLIGMYKQMVQRPERIIELARPLFSQYAANEDIYSHVREAFNRAAPADVRAAYFLYLNKFGFNGLTRYSAKGNFNVPWGRSVKAPALPEESIRVFSERARDKAVIVQGDFTDAFKLAVPGDVIYCDPPYVDLVDAQSFTKYTAEGFPRERQQELADLARATAARGIPVVISNHLTAETRELYRGAECHEVEVRRSVAAQAHSRKMVAEGIFVFKT

SEQ ID NO: 36159 - protein, 331 aa, Ralstonia metallidurans CH34
METEMSNHAGDAPFLELRLSERRKEADGILSFELVHPDGEQLPAFDAGAHILVDIVPGVSRAYSLCNDPAERHRYVIAVLRTEDSRGGSVGMHQAIEPGQLVRVSAPRNEFELVQSAGRSLLFAGGIGITPLLSMAETLANADREFELHYCTRDAAKTAFTSRIETRFSKQARIYHDLASKEQPFDARKVLKQGGSDDHVYACGPSGFIEHILSTAAELGWEKRQLHREFFGSPTTQNDGSAETAFDLILASSGKKVHVPCGVSAATALLEAGISLSMSCEQGICGTCVTTVLNGMPDHRDHYLTDDDRSRNDCFMPCCSRSLTAELLVDL

SEQ ID NO: 36160 - protein, 321 aa, Ralstonia metallidurans CH34
MSMNTSQIELRLKRITFEAERISSFEFVSADANPLPGFQPGAHIDLHLQQGMIRSYSLANAASADPLYYRVAVQREPNGRGGSRWAHDKLRVGDKVWATPPQNDFPLDECASSTVFFVGGIGITPVLPMLRRLDAIGREWKLMYASRSPGETAFAEELQRIDAGRGRIVHFHDSEPGQRLEIRATVAALPASTHVYCCGPTGMIDDFLAVTAERDPSTVHYERFGAAQQAATEGGFDVVLHRSGAKYRVEPGKTILDVLLDNNVAVPYSCCNGVCGSCRTEIIDGQADHRDDFLSDEEKQANQAIMVCCSGARSKTLVLDL

SEQ ID NO: 36161 - protein, 320 aa, Ralstonia metallidurans CH34
MPESISLAKQVVATEIRALEAMNARVSEDFGRTVKCILSMKGRLVVVGMGKSGLIGRKIAATMASTGTPAFSVHAGEAFHGDLGMIRPTDVVLMISNSGETEELVRLLPFLRHQNNYVIAMTGKPASTLGKAANTILDISVEREACNNNLAPTSSTTAALVMGDALAVVLASKRGFQPEDFARFHPGGSLGRRLLTRVADVMHKGTLPVCTAQTSFKDVVHVVNRGRMGLALVMQGERLLGIITDGDIRRGFDTVHDYRSILAEDLMTTRPKAIAPDARVGDAEALLRQEKIGALVVQDIDGRVIGIFQMHGAEEAPGVH

SEQ ID NO: 36162 - protein, 335 aa, Ralstonia metallidurans CH34
MALRPLKPTSRSSLSLALPLRPEVMKPALLILNHLEPAHLALIAEHYDVRYAPTAAERATEVATNGKTFRAVLTIGSIGLTAKEIDAMPALELVCAMGAGYENIDTAKCRERGIAVGNGAGTNDSCVADHAMALLLASVRRVPAYDRATREGIWRNALPLAPNLSGKRMGIVGLGTIGRRIAQRGLGFDLEIGYHNRRPRTDVPHRYFDSVMSLAEWADYLIIATPGGAETRHMVDTPVLRALGPAGYLVNIARGSVVDTAALAAALRAGELGGAGLDVYESEPAPPVELFDCPNVVLTPHVAGWSPEAIFASVSQFVENARRHFAGEPLVAPVL

SEQ ID NO: 36163 - protein, 67 aa, Ralstonia metallidurans CH34
MQTGIVKWFNDAKGFGFIKPDAGGDDLFAHFSEVRADGFKSLQENQRVSFEVKNGPKGLQAANITPL

SEQ ID NO: 36164 - protein, 441 aa, Ralstonia metallidurans CH34
MTTILQHIPSGQRVGIAFSGGLDTSAALLWMRQKGAIPYAYTANLGQPDEPDYDDIPRRAMAYGAEAARLVDCRTQLVAEGIAALQCGAFHISTAGVTYFNTTPIGRAVTGTMLVAAMKEDGVNIWGDGSTFKGNDIERFYRYGLLTNPGLQIYKPWLDQQFIDELGGRAEMSEFMRQHGHAYKMSAEKAYSTDSNMLGATHEAKDLEHLDSGIRIVQPIMGVQFWRDDVEVKREEVTVRFEEGQPVALNGKTFANAVDLLMEANVIGGRHGLGMSDQIENRIIEAKSRGIYEAPGLALLFIAYERLITGIHNEDTIEQYRDNGRRLGRLLYQGRWFDPQAIMLRETAQRWVAGAVTGEVTIELRRGNDYSILNTTSPNLTYKPERLTMEKGESMFTPLDRIGQLTMRTLDIVDTREKLQTYAKSGLLSNQTSAALPKLED

SEQ ID NO: 36165 - protein, 184 aa, Candida albicans
LREYTISEFPKNNEYRITVRYIPGGKVTTYIHEKLAVGDIVQVSPPCGDCYYRSSKRNMVMLAGGNGVVALAPMIEKGLAEGRKVKFLYSNRSTETRSFGQFFRDLKQKYGDQLEVVEYLSRRRVIDPIDKYYRRSLTVEDLDFIVPEDDVYLIGPRTYMKMIEDYLKGRGVNVTLDYFGPQEV

SEQ ID NO: 36166 - protein, 225 aa, Candida albicans
PECVGTKSFFITPVDGTPVPIPKRGQYLCMRWKFPGEKQERLREYTISEFPKNNEYRITVRYIPGGKVTTYIHEKLAVGDIVQVSPPCGDCYYRSSKRNMVMLAGGNGVVALAPMIEKGLAEGRKVKFLYSNRSTETRSFGQFFRDLKQKYGDQLEVVEYLSRRRVIDPIDKYYRRSLTVEDLDFIVPEDDVYLIGPRTYMKMIEDYLKGRGVNVTLDYFGPQEV

SEQ ID NO: 36167 - protein, 252 aa, Platanus x acerifolia
MHHSVSWMAMAAVAAAFLQLCSSVENVETSHLEADRINKLPGQPQVSFQQFSGYITVDERKQRALFYYFVEAEKDPASKPLVLWLNGGPGCSSIGVGAFSEHGPFRPSGEILIRNEYSWNKEANMLYLETPAGVGFSYSTNTSFYKAVDDEITAKDNLVFLQRWFIKFPLYKDRDLFLAGESYAGHYVPQLAQLIVQFNKKEKLFNLKGIALGNPLLEFTTNLNSRAEYLWSHGRISDLTYRVLTSACNYSR

SEQ ID NO: 36168 - protein, 222 aa, Platanus x acerifolia
IGKLRSNFLGTKFTIYDGQPPHAGATVTKSRSTRLVGLKQVSPRIPAGNYSVAHISYEVNVLGSRGPRRMQCVMDAIPASAIEPGGVAPTQTELPLSNADSFPLLPFFRSKSTRTENHLQPGPLVSQKDGVLVLKNKAPRWHEQLQCWCLNFRGRVTVASVKNFQLVASPGNGPAGQEHEEVILQFGKVGKDLFTMDYQYPISAFQAFAICLSSFDTKIACE

SEQ ID NO: 36169 - protein, 353 aa, Sphingomonas sp. A4
MKTGSYPGKVSIRIADSDIDFHAEPGDPLLRAALRSGIGMAYDCNSGGCGSCQIELVEGEIEDIWPDAPGIGARARKRGRLLACQCRPLSDCVVEARVEDRFRPVVLPQRRSVRLVGFRPITHDLAEFTFASEDGKADFQPGQYAMLAIPGVEGERAYSMANLANAEGQWSFVIKRMAGGAASNRLFDEREALEGLELDGPYGTAYLREETPRDIILVAGGSGLSPILSIAAGIARSEKLAGKRVMVFYGGREAKDLCAARQLDRLFPDGHRFEVIEATSEGEEGAREAGASRVQYKGFIHEVLAAYLKENALDFGGFDYYFCGPPPMINALNRMLQLEFNVPEDQLFFDSFL

SEQ ID NO: 36170 - protein, 331 aa, Triticum turgidum
MTQNLGISVPIMSSSPMFANAPPEKKGVKNFAIDFLMGGVSAAVSKTAAAPIERVKLLIQNQDEMIKAGRLSEPYKGIGDCFGRTIKDEGFGSLWRGNTANVIRYFPTQALNFAFKDYFKRMFNFKKDKDGYWKWFGGNLASGGAAGASSLFFVYSLDYARTRLANDAKASKGGGDRQFNGLVDVYRKTLKSDGIAGLYRGFNISCVGIIVYRGLYFGLYDSLKPVLLTGTLQDNFFASFALGWLITNGAGLASYPIDTVRRRMMMTSGEAVKYKSSLDAFQQILAKEGAKSLFKGAGAKLLRAIAGAGVLSGYDQLQILFFGKKYGSGGA

SEQ ID NO: 36171 - protein, 870 aa, Oceanobacter sp. RED65
MEKFTSSLQQALSDAQSLALGKDHNQIETAHLLLALLEQAPGGIRPLLQGLGVQAGSLRQKLEGVLGNLPVVSSPDGNLSVSSELGRVLNLTDRLAQKRGDQYISSDLVLLAALEEKGDTGKALNDLGLNKEKVERAIDTVRQGESVDDPNAEDNRQALDKFTVDLTARAEEGKLDPVIGRDDEIRRTIQVLQRRTKNNPVLIGAPGVGKTAIIEGLAQRIVDGEVPEGLRNKRILSLDMGSLLAGAKFRGDFEERLKNVLKEVSKQEGNIVLFIDEIHTMVGAGKTDGALDAGNMLKPALSRGELHCVGATTLDEYREYIEKDAALERRFQKVLVDEPSEEDTVAILRGLKERYEVHHGVQITDGAIIAAAKLSTRYITDRQLPDKAIDLIDEAASIIRMEIDSKPQEMDRLERRLIQLKIEREALNKESDEGSKKRLNEINGEINKLGREYVELEDVWKQEKLSLEGSKQAKEALEEAKVEMEQARRAGDLQRMSELQYGKIPELEKQIEAAEKAEKGSNEFKLLRNRVTDEEIAEVVSKWTGVPVAKMLEGEREKLLRMEQELHKHVVGQDDAITAVSNAVRRSRAGLSDPRKPNGSFLFLGPTGVGKTELCKALATFMFDSQDAMVRIDMSEFMEKHSVARLIGAPPGYVGYEEGGYLTEHVRRKPYSVILLDEVEKAHPDVFNILLQVLDDGQLTDGQGRTVDFKNTVLVMTSNLGSDVIQTMSHHNQGEEQTDTEYEEMKSAVMEIVGGHFRPEFINRIDEVVVFHPLQKSQIQGIAQIQLQELEKRLKERELSLQLSDEAINRLVEVGYDPVYGARPLKRSIQRWIENPLAQDILSGKFVPGDRIVAEVSGDQLSFTVAQTVH

SEQ ID NO: 36172 - protein, 289 aa, Oceanobacter sp. RED65
MNISFIGLGKMGYPMAKHLVQANHQLEVFNRSPSKSEDFKRNFEQCTIANSLTDCGKHSEIIILCIGNDEDVRNTLTGKDSLYSNLKPGTLVIDHTTTSAELACEMQAKLLEKQVDYVDAPVSGGEQGAISGQLTIMCGGQALAAERAQGITQAYSKSFTHMGPIGSGQLTKMVNQICVAGLIEALAEGIHFGQQAGLDMEKVMKVVGSGAASSWQLQNRYQTMLEDQYDFGFAVDHMRKDLEICLKEAKKMNTSLPSTAMVDQLYGELQQSGHGQLDTSSLLKRLQNK

SEQ ID NO: 36173 - protein, 404 aa, Oceanobacter sp. RED65
MHEFHKSNKLANVLYDIRGPVLTAAKRMEEEGHRILKLNIGNPAPFELNAPDEIIQDVIHELPNAEGYSDSKGIYSARKAVMQYSQQKGIDGVEIDDIYLGNGVSELIVMALQALINNGDEVLIPAPDYPLWTGAVSLAGGTPRHYICDEQSNWYPDLDDIRAKVTPQTKAMVIINPNNPTGALYPKEVLEGMIEIARENNLVVFSDEIYDKIIFDEVEHTSTASLADDLLFITFNGLSKTYRLAGFRSGWLIVSGAKHKAKDYMEGLDMLANMRLCANVPAQYAIQTALGGYQSINDLIKPGGRIYEQRMTAHNMINDIPGLSCTLPQGALYSFIKMDQKRFNIKNDEKMVLDLLEQQKILIVHGRAFNWPEPDHFRLVFLPRVEDLEQAIEKMGHFFERYSQ

SEQ ID NO: 36174 - protein, 266 aa, Oceanobacter sp. RED65
MHRAKIEGLFMAVDKNIISLAKSGAGKPHCSTCSLSSLCLPIALDNEDLDALDEIIKRGRPLQKGETLFKQGDDFKAVYAIRTGAIKSYTVAPSGEEQITGFHLASEIVGLSGYSEESYPLTAKALETTTVCELPLDKLDSLCDEIPGLRRQMMRNMSGEIRQDQQMMLQLSKKTADERLAYFLLDLSSRFERRGFSPKTFRLSMSRVDISNYLGLAVETVSRIFTRMQKSELISTEGKEVTLLDIHGLNKLAGNPDIKASCEHSI

SEQ ID NO: 36175 - protein, 404 aa, Oceanobacter sp. RED65
MENINSAVETLISSSNTFFILLGAIMVLFMHAGFAFLEVGTVRHKNQVNALVKIITDFGISTIAYFFVGYSIAYGADFFASASDLTGNNGYELVKFFFLLTFAAAIPAIVSGGIAERAKFYPFLIASALIVAFVYPFFEGMIWNGNYGYQDWLETTFGAQFHDFAGSIVVHGVGGWLALAAILILGARNGRYRNGRPVAFAPSSIPFLALGAWILTVGWFGFNVMSAQTLDGISGLVAVNSLMAMVGGTIVAMLMGRVDPGFIHNGPLAGLVAVCAGSDLFHPMGALVVGGIAGGLFVYTFTLFQNKVPRIDDVLGVWPLHGLCGAWGAIAVGIFGTEAFGGLGGVSFMSQLIGTLTGIAVALIGGFIVYGLVNAVSGLRLSEEEEFDGADLAIHKIAATSEDK

SEQ ID NO: 36176 - protein, 68 aa, Oceanobacter sp. RED65
MSKVTGTVKWFNDEKGFGFIQQDGGKDVFVHYSAIQGSGRRTLAEGQQVTMTVTQGQKGLQAEDVEPA

SEQ ID NO: 36177 - protein, 545 aa, Oceanobacter sp. RED65
MFVPWRSKPLELGNNLSAGIIVAFLIIPQAIGYGLLANVPANIALAAATLPLIAYALFGGSRSMAVGPVAIVSLMVAEATTDMSANEIALSVPLLALMVGTILLTIRFLSLGKLVNFIGHPVIQGFTSAAAVLIIFKQLELMLGLPSDVFNVNTWHLPSLLLSTLSLISLIIVKGFMPSPLNKLGPLMVLLAGMIIALNLPNLKIETIGYHATGDIFTLFSPWNQDTNALSNTLLTLLPSAVIISVLVFLESTSVAKVVAKKHDERISPNQELMGLGSANIIAGFSGAFPVAGGFGRTMVNEEAGSTSPLAGVFTALFVLLFINFIPESINYMMKPVLGAIIAMAVWSLIDLSPLYSHWKIHPQDNAIWLASFLGVFILGVESGIMIGVGLSIAFLLRNAAHPHIAIIGRIPNTSHFRNVRRHKVETHPHVLAIRIDEGLTFANAENIEDFIARAIFDHPKTRHLLLVFSAVNQIDSDGLERLESIIRRQKKEGILTHLAEVKGPIMDKLQHLHLEKLLAPGQIYMSTHEAFEALENQNDNEHKS

SEQ ID NO: 36178 - protein, 579 aa, Oceanobacter sp. RED65
MLRWLWGFVGPYRSRLIVALIALVLTSALTLSLGQGVKLLVDEGFAAGSHEGLKDSLQIMLVLIVALALGAYFRFFMVSWIGERVVADIRKRLYGHLLTLTPSFFEDNLAGEIQSRVTTDTALLQTVIGSSLSFALRNVLIFVGGLVLMFISNLKLSLMVIAVVPLIVFPLIFIGRKVKRLSKQSQDEVASVGAWAGESLQNIKVVQAFTRESHVAEQFDQGAEQAFAVALQRIRYRAFLIALVMIMVMGAITAMLYVGGSDVISGELSAGDLSAFVFYAVMVAGSLAAVTEVYGELQRAAGAVERIRELLATQPTILDKGGETVVKDHSGSAAIELNNVSFAYPSRPDQWALQDVSLKIQAGQSTALVGPSGAGKSTLFDLLLHFREPQKGDIFINNQNIADYPLAMLRNMYALVPQNPVLFSSNVWDNIRFAKPDATDQEVIDACKAAHAYDFIMALPEQFDSFLGEQGVKLSGGQKQRIAIARAILRDPDVLLLDEATSALDAQSEFWVQQALNELMRDRTTLIIAHRLSTVRHVDQIALFDQGRITAVGNHSQLMQNSDLYKRLAELQFQGETEA

SEQ ID NO: 36179 - protein, 318 aa, Oceanobacter sp. RED65
MDHKQELQNPMASADADMPLYGSLGMTFMEFPYAPSVKQTDADVVVSGVPFDMATSGRSGARFGPQGIRSASANLIWEGARWPWDFALDDHLKVADVGNVNFKHGEPQTLVDNLQRHILQIMESGKKSLTFGGDHFITLPILRSVAKIHGPVCLVHVDAHTDTYSGGSKYDHGTFLHHAVEEGLVDDKHSVQIGIRTNYSKDAHGFEVLDAAWVGDHGPHEVLKHIKEKVGDRPVYVTFDIDGLDPAFAPGTGTPVSGGLTMDTALKVIRGLQGLNLVGMDVVEVAPAYDHADITSLAGATLALDFLYVLAHNKIHHS

SEQ ID NO: 36180 - protein, 392 aa, Oceanobacter sp. RED65
MDLKLSNRVQSIKPSPTLAVTNRAAELRAAGKDIIGLGAGEPDFDTPEHIKDAAKQAMDNGFTKYTAVDGTPDLKKAIIAKFKNDNGLNYEANQILVSCGGKQSFFNLSLALLNPGDEVVIPAPYWVSYPDMVKIAEGVPVIIETDASARFKITPEQLDNAITDKTKLVVLNSPSNPSGMAYTKAEFEALGDVLRKYPNVLIATDDMYEHILWTEEDFNNIVTVNPDLYERTIVLNGVSKAYSMTGWRIGYAAGPQPLIASMKKIQSQSTSSPTSIAQVAAQAALEGNQQCVKDMVTVFKKRHDFMVDALNEIDGIECLNGDGTFYLFPSFKGAQAKLNCETDTDLAEKLLEAGVALVPGSAFGTPGHMRISFATSDSNLEQSIERLKKALG

SEQ ID NO: 36181 - protein, 108 aa, Oceanobacter sp. RED65
MSDIMDQIKEQIESNDVLLYMKGNPNQPQCGFSARAVQALMECGKRFAYVDVLSNPDIRSNLPIYANWPTFPQLWVKGELVGGCDIITEMGANGELKQIIDQAVPDEA

SEQ ID NO: 36182 - protein, 521 aa, Oceanobacter sp. RED65
MENIKQESIRTPAAQGPPKAWYQLVDLPVFAISGGLLLLFALLALYDLDLVSTTVNQSFAVSTKLFGAYWQVLLLFTFFIGLYLAFGRTGHVVLGGTDQPEMSTFRWTSIIMCTLLAGGGVFWAAAEPMAHFTSQPPLFSDAEAGSLAAAHNALAQSFMHWGFLAWAILGSLTGIVFMYLHYEKGLPLKPRTLLYPVFGERALKGPIGTFTDAACVLAVVAGTVGPIGFLGLQVSFGLDKLFGIPDTYSTQLVILGSLITLYTISSVTGVTKGIQILSRFNVILAVVLMLVILVFGPTAFLVDGFLQSFGTYIDQFIPMATFRANPAWLDWWTVFFWGWFLGYGPLMAMFVARISRGRTIRDMILLISVLAPVITCIWFTIVGGSGLFYELENPGVISEPFTGFNLPAALLAITENLPMGFIMSVLFLILTTVFVATTGDSMTYAVSMVMTGHDHPHTGVRIFWGIMMGVIAAILISMGSGGISALQKFIVVTAVPVSLILLPSLWTAPRIAKQMQKEQGK

SEQ ID NO: 36183 - protein, 556 aa, Oceanobacter sp. RED65
MTEATAKPVNFIAKVITEDLENGKHSNIVTRFPPEPNGYLHIGHAKSICLNFGLAEQFGGQCNLRFDDTNPEKEEDEYVNSIKEDVSWLGFQWAGEIHYTSDYFDQLHDWAVHLIKEGKAYVCELSPEQAKEYRGSFDEPGKNSPFRDRSVEENLELFAKMRAGDFDEGKASLRAKIDMASPNMNMRDPVIYRIKKAHHHQTGDKWCIYPSYDFAHGQSDAIEGITHSVCTLEFADHRPLYDWFIENLPTPAEPHQYEFGRLNINYMVTSKRKLRALVEGGVVAGWDDPRMPTISGMRRRGYTPTAIRNFCDSLAVAKTDGTVDIAQLEHFIRDDLNQNAPRAMCVINPLKVVISNLSDDHEETFSVPYMQDREDLGQREMPFTKELFIDQADFKEEYSKKFKKKFCVGKRIRLRHGYVLEADGFEKDADGNITQVNATLIEDTLGKDPADGDKPKGVVHWVSAKHAKEAELRTYDRLFLDANPDSGKKDFMESINPESLIVKTGLIEPALANVESETVFQFEREGYYVADRKDHTADKPVFNLTIGLRADKALSN

SEQ ID NO: 36184 - protein, 580 aa, Oceanobacter sp. RED65
MTETPSSSDWALYKRLFSYVLKYKLMFFVAIFGFALYASSAPMLAHLMVVIEATYHNPTEWSRFLLVLMILGIYLFRGVGSFLGDYFLAKVGRTVVHNLRTHVFNHYLLLPNDFYDKHAKGHLISKITFDAEQVFGSVTNAVTSLIREGLTVIGLLAYMLWMNWKLTMVFFIAAPFIAFVVSKANGYFKRYSRNVQGSMGKVTQVAGESINAYQEIKIFSGQDYERNRFAKASDGNRRQTIKFLGVKAISVPVMQMIVAFAIASLIWVALDPRIIADMSFGDFMAFVTAASTLAKPMRTLASINSLIQQGIVAAKSMFDVLDEIPEPDHGSYRVNRADGELQISKLSFSYPDSDEQVLNAIDLHIKPGQSVALVGQSGSGKSTIVSLLTRFYDANQGQIKLDGRDLNEFDLANLREQISLVSQSVTLFNDTVYNNIAYGDLANKTEDEVYAAAKAAHALEFIEEMPEGMQTLIGDDGVMLSGGQRQRLAIARAILKDAPILILDEATSALDTQSERYIQEALETLMQDRTSIVVAHRLSTIEKVDSIVVINQGRIVEQGSHEELLARGGAYKNLYEMQFT

SEQ ID NO: 36185 - protein, 391 aa, Oceanobacter sp. RED65
MSYADNDVVVIDAVRSPMGRSKGGVFRNVRAEDISANLINALFERNPNANPKDVEDVIWGCVNQTLEQGFNVARQISLMTDVPKEAAAQTVNRLCGSAMTAIHTAAQAIQTGNGDVFVVGGVEHMGHVNMQHGFDHNPASSKYAAKASNMMGLTAEMLGKMHGITRQQQDEFAARSHRLAHKATLEGDFKNEIVPMYGHDADGKQILVTEDETIRPETTVESLGKLRPAFDPKGGTVTAGTSSQITDGGSAMLLMSGKKAKELGLTPRAKIRAMAVAGCDAAIMGYGPVPATKKALKRAGLEASDIEYWELNEAFAAQSLPCVKDLGLKDIADERVNIHGGAIALGHPLGCSGARISTTLINVLEQKDAKLGVSTMCIGMGQGIATVWERL

SEQ ID NO: 36186 - protein, 92 aa, Oceanobacter sp. RED65
MQTGKVKWFNNAKGYGFILSDEGGEDLFAHYSSIQVEGYKTLKAGQSVQFDTKPSDQGTHAINITPLDMLSAKKSNQEQNREKVLGAEAQGA

SEQ ID NO: 36187 - protein, 378 aa, Oceanobacter sp. RED65
MLIGVPKEIYPGETRVALIPTGIQELLNAGFDVIVEQDAGEGAHFSDEEYRTCGASIAPNAKSLYEQADIVIKVRQPLEDEVELIKEGTTLICMLDAWFNLPLVQKLAERKIRSFALEFIPRTTRAQSMDVLSSMGAISGYRSVLTGAMELPQYFPMLMTAAGTIHPAKVFIIGAGVAGLMAISTARRLGAVVEAYDTRTEVREQVESLGAKFVEFDLETEEGTNSGGYATEKSEEFYRKQREQMQQKVSQADLVITTAAIPGKQSPRLITKEMLHYMKKGSVIVDLAAERGGNVEGTVAGHKEYIDGVTIIGYTDHPGRVPVHASQLLTKNVSTFLLNMAAEGELNIDMEDDIVAATLVTEDGEVKHEGLKAQLEQE

SEQ ID NO: 36188 - protein, 289 aa, Oceanobacter sp. RED65
MSKPIFLESEIEQSPIDQAAFSVLPVPYEKTVSYGGGTALGPNAIIVASEQLETWDGKSNPSALGIHTCDTVDCQVDPDVVIENIAKATQAILEAGSMPVVLGGEHTVTYGVIKGYLNAGIKDFGVVQIDAHADLREAYEGDKLSHASVMKRVVDEGIPLYQLGIRAYCEEEMAIREKHGVRYQDADDIVPQNIQSIQLPDDFPKNVFFTLDIDGMDPSVFPSTGTPVPGGLSWYQTLNLFESVAKQRKIIGFDVMEFAPIEGFHAYDFSAALLTYKLMGIVQRTQFSA

SEQ ID NO: 36189 - protein, 278 aa, Oceanobacter sp. RED65
MSYVVPSEFATKMVDAGESKLFMSTRDTLIRAFMAGAILALAAAFAVTVAVQSGSFLIGAILFPIGFCMLYLMGFDLLTGVFMLTPLALLDKRPGVTVPTILRNWGLVFCGNFAGALTVAFMIAFILTMGFNTEPGAVGEKLSSVGEARTLGYAEYGTAGWFAIFIRGMLCNWMVSMGVVGAMISTNVSGKVLAMWMPIMLFFFMGFEHSVVNMFLFPSAMIMGGDFSIMDYLIWNEIPTVLGNLVGGLAFTGLTLYVTHYKTGTKRPQPEMKAATAQ

SEQ ID NO: 36190 - protein, 310 aa, Oceanobacter sp. RED65
MVFTGNANPELARLIVERLDLPLGDAVVGQFSDGEITVEINENVRGKDVFIIQPTCVPTNDNIMEVLLMADALRRSSAGRVTAVIPYYGYARQDRRVRSARVPISAKVVADMMQAAGVDRVLTVDLHADQIQGFFNIPMDNIYGSPILLDDIEKQNYDNLMVVSPDVGGVVRARAIAKQLDEADLAIIDKRRPQANEAQVMHIIGDVTDRTCVLVDDMVDTAGTLCKAADALKQFGAKKVVAYCTHPVLSGAAIENIRGSQLDELVVTDTIPLTKDAKACKQIRQLTLSGLLAESIRRVNNEESISAMFR

SEQ ID NO: 36191 - protein, 555 aa, Oceanobacter sp. RED65
MKVSDLFVKVLKQHGVRYLFGIPGDAINDLMESVRKEEGIEFIQVKHEEAGALAASVQAKLTGKLTACVGTSGPGAIHLLNGLYDAKMDHAPVLAITGQVETQYMGTNYHQEVDLERLFSDVSCYSQTVTTANQLPDVLLEACRAAISGRTVAHLNLPSDIAQKQINEDVSELSDTVFETHTIPSTSDCNEALKLIDDAQRICILAGIGTACAKPELLELSEKLKAPIVRTLRAKEVIDDQHPNCIGGLGLLGGKPAIEAMNDCDLLLMIGTDFPYKEFYPKNAKVIQIDIEATQIGKRHPVNVGLVGHARFVIQALLEQLTPRSDDAFLSVLQDAMQSWRKSQYKSETSSDFPIKPQRLIHEVSRVAPDDAIFVCDTGTVNAWTARHLHVKPSQRYTLSSALGTMGVGLPGAIGAKLAYPDRTVISLVGDGGFAMTMTDLVTAVNYDLPMVIIILNNQKLGFIKLEQEAAGLPAFGIDLKNADFVAFAKACGADGISVEQPENLETAIEQGLLSHKPFVIDVSINPDELIMPPKIEASQAMNFVKAKAKEWLGQ

SEQ ID NO: 36192 - protein, 454 aa, Oceanobacter sp. RED65
METKTATIESLQAMVEAQQASFEMHQAMNMEVFYWWCTAIMVMIHAGFLAYEMGASRSKNALAAGIKNILALAVIIPTFYLFGWWIYNAFPHGFTPIDASAALPWSQSMGPDVQDMGTGIFWAAFALFGATTGSILSGAVIERIRVSAFLILTVCLGSAIWILAGAWGWHPDGWLLTQLGYHDVGASGVVHAIAGFFTLGVLINLGARKGKFIDGVAQTIAPHSLPMTLIGLMMIIFGFFGFLGGCIIFNGGETGWTTIYNTPTNLSAFAFNTLMGFAGGIIGCYIATRDPFWTMSGGLVGIISVAAGLDLYSPSLAFIIATCMGVAAVQFAKLLERLQIDDAVGAVAVHGFTGAVAVVLVGVFAHGTPNVNGAPDITFTGQLISALVMIALGFLPGYGISYALKKANALRVPESAEEIGIDEVEILAKPYPEANTPASIESDVPNKLAEPQGV

SEQ ID NO: 36193 - protein, 638 aa, Oceanobacter sp. RED65
MGKIIGIDLGTTNSCLSVLDGDKARVIENAEGDRTTPSIIAYADDGEILVGQPAKRQAVTNPQNTLYAIKRLIGRRFEDDVVQKDIKMVPYTITKADNGDAWVEVKGEKFAPPQISAEVLKKMKKTAEDYLGEKVTEAVITVPAYFNDSQRQATKDAGKIAGLEVKRIINEPTAAALAYGIDKEGGDRTIAVYDLGGGTFDISIIEVADVDGEKQFEVLATNGDTFLGGEDFDMRLIEFLADEFKKDQGMDLRGDALAMQRLKEAAEKAKVELSSASQTDVNLPYITADASGPKHLNVKVTRAKLESLVEELVKNSLKPCEMALKDAGVSASEVDEVILVGGQTRMPLVQKSVADFFGKEPRKDVNPDEAVAMGAAIQGAVLSGDVKDVLLLDVTPLTLGIETMGGVATAVIEKNTTIPTKKSQVFSTADDNQSAVTIHVVQGERKQASQNKSLGRFDLADIPPAPRGVPQIEVTFDIDANGILNVSAKDKATGKEQSIVIKASSGLNDDEIEKMVKDAEANAEADKKFEEMIQVRNTADGLVHATKKTLEEAGDKATDEEKSAIEAAIAEVEEALKGDDKDAIEAATNKLTEASSGLAQKMYAEQAQQAQGAEGAQEEAGKDDDVVDAEFEEVKDNK

SEQ ID NO: 36194 - protein, 1482 aa, Oceanobacter sp. RED65
MRTGLYTPGEFKDNCGFGLIAHMEGQASHDLLRTAIESLTCMTHRGGIAADGKTGDGCGLLIQKPDSFLRQVAKTDIEVELPEQYAVGMVFLDLDEATAQKQRETFNQEIEKQGLKVLGWRLVPTNNDCLGPMAIDCLPRFEQVFVAPDSAIDESKLAVKLYYARRKTELALQGNEDFYICSLSEQTLSYKGLMMPVDLPNFYLDLGDERLETAICVFHQRFSTNTAPRWPLAQPFRMLAHNGEINTIRGNRNWAAARGAQFETPLLSELESIQPVVNTTGSDSSSMDNMLELLHTGGMDMFRAIRMMIPPAWQNVETMDSDLRAFYEYNSMHMEPWDGPAGLVITDGRYAVCGLDRNGLRPSRWVKTKNGYITVASEIGTHSYKAEDVIAKGRVGPGEILAIDTLNGEVLEANQIDTRLKDSQPYRKWLKENAVRIESELELKRLNEEPLTSDQVKVHQKLHLISFEERDQVLRPLAEQGVEGTGSMGDDAPMAVLSKNSRNIADYFRQQFAQVTNPPIDPLREAIVMSLETCIGKEKNVFVEAPDHASRIILTSPVLSPLKFNGLKNTGKDEFSYTTLPLAFDETLGLKQAIQTLVEQAEAAAREGTTILILSDRDVKEGQLVIPAAMATGAVHHALIKNSLRCSTNLVVETGDARDAHHFAVLLGFGATAVYPWLVYEVLGDMHRSGELIGDPLKSNQNFRKGIRKGLMKILSKMGISTIASYRGSQLFEGIGLAEEVVDLCFCGLTSRIKGADFSDFEQDLRNNTKKAFKARKTLDQGGLLKYVHGGEYHAFNPDVISTIQDAVQTGSQSAYDQYAKLVNERPVATIRDLFSLKTDNSISIDQVEPAEKIFPRFDSAAMSLGALSPEAHEALAQAMNELGGNSNSGEGGEDPKRYGTVKNSKIKQIASGRFGVTPHYLSSAEVLQIKVAQGAKPGEGGQLPGGKVNSLIATLRYSVPGVTLISPPPHHDIYSIEDLAQLIYDLKQVNPRAKVSVKLVSEPGVGTIAAGVAKAYADLITISGYDGGTAASPLTSIKYAGSPFELGLAEAHQALRANDLRGNVRLQTDGGLKTGLDIVKAAILGAESFGFGTTPMVAMGCKYLRICHLNNCATGVATQNDELREKHFIGTVEMVKNFFRFVAEETRQWMAALGVRTLEELVGRTDLLEVIEGQTEKQRKLDLSDLLGNDQIPADKPHTVQVDRNTPYDEGALAEKMVADILPSIEAKKGGEFSYNISNCDRSIGARLSGEIALRHGNQGMASNPVTLKLTGTAGQSFGVWNAGGLNMHLEGDANDYVGKGMTGGKLVIYPPKVSSFASQDASIVGNTCLYGATGGTLYAAGCAGERFGVRNSGAHAVVEGAGDHCCEYMTGGQITVLGSTGYNFGAGMTGGFAYVLDMDKSFVDKYNHELVDIHRISNEETEAHRHHLRGIVKKYVAETGSEWGQEILENFEKYIGKFWLVKPKAASLEQLLENTRTRSE

SEQ ID NO: 36195 - protein, 523 aa, Oceanobacter sp. RED65
MANTDDKYHIDNTDYTVGQDNVQKWGFDVHNPVFGISAGLILIFLIAVLAVEPATAKGALDGLKWDIIASFDALFMWSGNIFVIFCLALALSPLGKIRLGGDNAVPEHSRLSWLAMLFAAGMGIGLMFWGVAEPVAYFTGWYETPLGVEPNTPEAARLAMGATMYHWGLHPWAIYGVVALSLAFFAYNKGLPLSIRSVFYPILGDRTWGWPGHVIDILAVLATLFGLATSLGLGAQQASAGINHVFGTEGAVGLQILVIVGVTLLAIVSVVRGLEGGVKLLSNVNMLIAFALLLFVAIAGFAIALGNIPTTLGAYIENIIPLSNPHGREDEAWFQGWTVFYWAWWISWSPFVGMFIARVSKGRTIREFITAVLLVPTLVTVLWMSIYGGIAIDQVLNGIGALGTDGLTSVELAMFQMFEGLPMSTLLSVVAIVLVLVFFITSSDSGSLVIDSITAGGKIDAPVPQRVFWASIEGAIAAALLWIGGTEAIQALQAGAISTGLPFTFVLLLMCVSLLMGLRTEKR

SEQ ID NO: 36196 - protein, 171 aa, Oceanobacter sp. RED65
MQNSSFKKVLVNVLIAIPAPAIMAALFYFIGGSQVFTFADPVAAASNENLVTLFVQQPGAVLGYLICVAFVFVLLLMASGLSKPQGRYKRRGTGTLIENDVDDGRERGLVKWFNVKKGFGFITRDNGEDVFVHFRSIRGTGHRSLSEGQNVKFSVVDGQKGLQAEDVSVVK

SEQ ID NO: 36197 - protein, 451 aa, Oceanobacter sp. RED65
MKRRSFLQNLVLAGSAMALPVTQQAHAKPLPWRNWSGSQVCYPENRLAPTSVAELSQIIQATRGNIRAVGAGHSFSPLVPTNDTMITLSRLNGIVSVDQANTTATIWAGTRLGDIGEPLAAENQALQNMPDIDEQTLAGSLATATHGTGESLGCLSSFITSMQLVTSTGETLECSSTKNADVFQAAKVGLGSLGIVTQVTLQNQKPYRLKRETSWMSIEDILANTEQLASNNRNYEFYYIPFTGMGFIDVQNVTEEPVSVTEKIDQNDGANDLKTARDLLSWSSTLRELVLGTYIKTLPDEVTVAASWQNYASERNVRFNEMEYHLPRENLVPAFEEIRKLVETQFPRVFFPFEVRYVKQDDAWLSPFNGRETASIAVHRFFQEDHLPLFKAVEPIFRKYHGRPHWGKFNTMEAQDFAKHYEHWNDFKEVRRSLDPNGKFMNRYLKSLFTA

SEQ ID NO: 36198 - protein, 68 aa, Oceanobacter sp. RED65
MSTVTGTVKWFNEAKGFGFIAQENGPDVFAHFSEIQGEGFKTLAEGQAVEFIVTQGQKGPQAEKIVAI

SEQ ID NO: 36199 - protein, 405 aa, Oceanobacter sp. RED65
MSDINKIVLAYSGGLDTSVIAKWLQEEYNAEIVTFTADLGQGEELEPARKKAEAMGIKEIFIDDLREEFARDFVFPMFRANAIYEGEYYLGTSIARPLIAKRLIEIANETGADAIAHGATGKGNDQVRFELGAYALSPNIQVIAPWREWDLNSREKLMAYCEEHNIPVENKQGKKSPYSMDANLLHISYEGDLIEDPWAEPEEDMWLWTKSPEAAPDEPTYIELTYKQGDIVAIDDKAMSPAEVMEHLNKVAGENGIGRTDIVENRYVGMKARGCYETPAGFVMLKAHRAIESITLDRDAAHLKDEMMPRYAELIYNGYWWSPERKMLQAAIDQTQENVNGKVRLKLYKGNIIVVGRTSDESLFDEKIATFEDDAGSYDQKDAAGFIKLNALRLRVAAKKGRKLL

SEQ ID NO: 36200 - protein, 373 aa, Oceanobacter sp. RED65
MSTVEIAPKTTRISQWFARSLTTHNSFAAFFEPLIQWIKPNWRADRCYTRVVSVRYESSDMYTLQLKPLQSFSHEFAGQYVELIIQKDGAWVSRYFTISSSPEFFRETGTIELSIAIQANGRITPWLMKNLNKGDMVNLGQPMGDFLPLNIPRDKSVSRKVFIAGGSGITPFRSSLQSLMQSDERDTQEIELFYYARSEEHFLFREELQRCAYLLPKAHVHFMDSEKIGFFDYTHLQVENKHQTDTAFFVCGPPAMIQHVRSTLNTHGVKKENIYYEFFGPEPLEADGQARAVLFQRAKLQANTEGNESLLELAEKQELKPVSGCRIGVCHQCICKKQSGRVRNIKTGEISDSGQQEIQLCISTAVDDVVLDL

SEQ ID NO: 36201 - protein, 521 aa, Oceanobacter sp. RED65
MNLGGLDLVALIGYLLVITGVGVYFSRKNTNTEEYFVGGRSFSGWVIGLSLVGTSISSITFLAYPGDAFKTSWLRFVPNLMLPLAVLFAAYYFLPFFRRRNTTTAYEYLEDRFGPSVRVYGAIAFIIAQIVRISMILFLLSLLIQELTGLSATWAIVVGGLIVATYTIIGGIDAVIWTDVMQTIVLLLGGILCLWVIVDALPGGLGQVFSVANDFDKLSFSVLNDGLLENVGWDIQFDEKTVSMMLFIGLIAWLTEYSSNQNTVQRYCASKSTKEARRAMLIAVASSLPIWAFYMFLGTALFVFFQQFPAEPASMMLNGEKAAEGILPYFISNHLPAGVAGLVIASALAAAMSSLDSSINAISTVSIVDIYRRHLKPEQNDRHYLKAAWLIATITSVLMILGAIYLAHADNTTLQDTATILTSILGGGLLGLYLIGFFTKKGDARAIWVGLVSTMIFTSWTILSKNQLLPESLQVPFDLYYTGFVGNVVMFIVTYFVAAKVFPSDRDLSGLTVYDLPKENS

SEQ ID NO: 36202 - protein, 402 aa, Oceanobacter sp. RED65
MTAQQNILVLNLGSSSLKFAVIQPQSGHVALSGLAERLGNDARFEYKFDDQKHDIELANGAVHKDAISTLISTLEQNNLLTTLAGVGHRVVHGGETFSESMLITQENIEKLDQLNHLAPLHNPVNMEGIHSISELLPQIHQVAVFDTAFHQTMEDKAYLYALPYELYEQHAIRRYGFHGTSYRYVSQKAAQQLGISQSDSQFLIAHLGNGCSACAVKNGESVDTSMGLTPLEGLPMGTRSGDLDPGLSEYLNQQLDMTQDDIMTLYNKQSGLLGVSGISNDMRTIQQHAEKGDRRANLAIELFAYKIARYLGALATNLERIDALVFTGGIGENDALTRSLILEQMTIFGFKLDGERNQQNGDESGRITSDDSTLAMVVATNEEMMIAQDTQSIIAQLQDEGA

SEQ ID NO: 36203 - protein, 710 aa, Oceanobacter sp. RED65
MQHTFFIAPTEMKTGLTSITLGLMRALDQLGVKVAACKPISREQYDNTHRSIELIAAASGKQPPTPISLPEAQKMMSDKKHDRLMEEVVAMHHKIAKDVDVVIVEGVEPDRNEPYALRLNVEMAKTLDAEVILVAAPNDRDQKALASHVDMAKNLYGGDKNQKLLGIILNKINAPANRSIPIKTQEGPEPTPLSLDELKASYKSLETDHFKLLGLIPWDSDLVAPRTKDIANYLQADVISAANMEDARVKRISLCARTVPNMITALQPGALIVTPGDREDILLAAAMAAQNGMPLAGLLFTSDLDPDERVMGLIAPALAHMPVLKVSTDTFTTATQLASMDDGVKASDPQRMNAIMTHMAEHLDSEYLAARLEVDHHVRLSPAAFRYQLVQLASQANKRIVLPEGDEPRTIQAAAMCQQRGIARCVLLGNPERIQQVAASLGVTLPEDLEILDPEAIRERYIDPMVELRKHKNLTAPMAEAQLEDNVVLGTMMLALDEVDGLVSGAVHTTANTIRPALQIVKTAPDAKLVSSVFFMLLPEQVMVYGDCAVNPDPNASELADIALQSAQSAEAFGIAPKVAMISYSTGSSGSGSDVEKVREATSIAQKNRPDLLIDGPLQYDAATTASVAASKAPDSKVAGQASVVIFPDLNTGNTTYKAVQRSANVVSIGPMLQGLAKPVNDLSRGALVEDIIYTIALTAIQAANQAKAK

SEQ ID NO: 36204 - protein, 294 aa, Oceanobacter sp. RED65
MTHILIVDDVASNLVLLGSHLEDQDYSVIEATNGPQALDLLQSHDDIDLVLLDVEMPKMSGLEVLRKIKQDEQIKDLPVILVTANGDDQNVVDGLDLGAVDYVIKPYSLSVLLARVRSALREKERLDLMEKWATTDPLTGLYNRRFFFEQAQRELERVQRNETDASFIILDIDHFKKVNDEYGHLVGDDVLEGLAKLFKETFRKVDLCCRFGGEEFVICLPDTDTEGALLVAERTRKKVEELSFNTEKGPLHVTISLGVSSANENTTLEDMLKRADDALYQAKQNGRNRTESLD

SEQ ID NO: 36205 - protein, 395 aa, Oceanobacter sp. RED65
MSKQDSVVIVSGVRTPMGGFQGSLAPLSAPELGSIVIKEAVERAGLKPEDIQEVIMGNVLPAGLKQGPARQAMRKAGLPDATGATTINKLCGSGMKATMFAHDLIKAGTNDVMIAGGMESMTNAPYILPNARSGYRMGHGDQAMDHMFLDGLEDAETGRLMGSFAQEVADKRNISREDMDNYAIQSLTRAKDAIEKGLLKDEIVPVTVKTRRSETVVEHDEQPFNANIDKIPSLRPAFAKDGTITAANASSISDGASALLLMRESEAEARGLKPMARILGHATQSQHPSEFTIAPVGAVENLLKKLEWSASDVDLWEINEAFAMVAMMPIMDLGLDPETVNIFGGACAQGHPVGSTGSRLIVTLMNALKQKGKNKGVAALCIGGGEATAMAIELL

SEQ ID NO: 36206 - protein, 377 aa, Oceanobacter sp. RED65
MDLLARAKQFQAEGRDIIHLEVGEPDFPSLPCVISAGQQALANGHTHYTPALGLPQLRQVIAQYYKSRYQVDVDWNRIVITPGASGALQLVTTLLLDESDQIMLADPGYPCNRHFAAVVNAQAQEVVTSAKDDFHLTALQVSQHWQKQTKAVMVATPSNPTGAVMNLQQLQDLQTAIKQQRGVLIVDEIYQGLVFDSAKDITALQLSGDQSNLFVINSFSKYFAMTGWRLGWMVAPEWAMEGLDRLAQNIFLAANTPAQHAALAVFEKEALQQLDERKTELQKRRDFLLPELIKLGFDVVAEPEGAFYIFARISHFNHRHAKDSMAFCLDLLEKTGVAITPGVDFSPSHGHEYVRFAYTQPISELQRAMDKIKHYLM

SEQ ID NO: 36207 - protein, 126 aa, Oceanobacter sp. RED65
MQSIMLKAKLHQARVTHAVLEYEGSCAIDGNLLDMAGIQEYEQIQIYNLENGERFTTYAIRGEEGSNMISVNGAAAHLADVGHRVIICAYANYSEEELKNFKPRMIYMQEGNEVSHTSNAIPVQLA

SEQ ID NO: 36208 - protein, 394 aa, Oceanobacter sp. RED65
MSTRDIVIVAAGRSAIGTFQGGLSSLSAVDLGSQVIKHLLTKHQIDGAQVDEVILGQVLTAGTGQNPARQSAIRAGLPNTTPAMTINKVCGSALKALHLGAQAIACGDADMIIAGGQESMSNAPHVMPNSRNGQRMGPITMIDTMITDGLWDAFNDYHMGITAENLAEKFGISREEQDTFAAASQQKAVAAQEAGRFDDEIIPITVPQRKGDDLVFDKDEGPRAGTTPEKLAAMRPAFKKDGTVTAANASSLNDGAAAVIMCSREKADELGLPVLATIKAYANAGVDPSIMGIGPVSATQRCLSKAGWELNDIDLIEANEAFAVQALSVGKELGWDSDKVNVNGGAIALGHPIGASGCRVLVTLLNEMQKRDVNKGLATLCIGGGMGVSIAIER

SEQ ID NO: 36209 - protein, 249 aa, Oceanobacter sp. RED65
MLNIKDLHAKVEEKDILKGLNLEVKPGEVHAIMGPNGAGKSTLGNVLSGRENYEATSGTVDFDGKDLLDMDTEERAREGLFLAFQYPVEIPGVSNLEFLKASVDAVRAHRGLEPYDSVTFLKLAREKCKAVDLNQNFLKRGVNEGFSGGEKKRNEIMQMMLLEPKLCILDETDSGLDIDALQVVANGVNSQRDPNRSFIVVTHYQRLLDYIVPDYVHVLADGKIVKSGGKELALELEEKGYGWIENGAA

SEQ ID NO: 36210 - protein, 378 aa, Oceanobacter sp. RED65
MNPVYLDYAATTPVDPKVAEAMADCLTLEGNFANPASRSHRYGWMAEEAVETARGQLATVINADVREIVWTSGATEADNLAIKGVAEQHGYQGSHIITSSIEHKAVLDTCAHLEQQGVEVTYLQPTSAGVITCEQVAAALQENTILVSLMYVNNEVGSINPISQIGDVCRRANVLFHVDGAQAVGKIKVDVEKDNIDLLSLSGHKFYGPKGIGALYVKRGVKLVAQIHGGGHERGMRSGTLATHQIVGMGVAASLVDDNTKDIKQLRDQLWQGLSQLDGVSINGDEASGVPHILNVAFAGVDGESLLLSIPQVAVSSGSACNSATMAPSYVLKAIGLDDELAHASIRFSLGRFTTQQQIEQTIESVTTAVNRLKGMAA

SEQ ID NO: 36211 - protein, 457 aa, Oceanobacter sp. RED65
MKAKSILKRFIRYTSLSVGLSVGLMNSVSADYPEKEDLKFGFIKLTDMAPLAIAKEKGFFEDEGLYVQLEAQANWKVLLDRVITGELDGAHMLAGQPLGATIGFGTQAHIITAFSMDLNGNGITVSNDVWEKMKKNIPHKNGKPVHPIKADYLKPIIDDYKKDGKAFNMGMVFPVSTHNYELRYWLAAGGIHPGYYAPHKGDNSGTINADAMLSVTPPPQMPSTLEAGTIEGYCVGEPWNQQAVFKGIGVPVITDYEIWKNNPEKVFGVSKKWADEYPITHKSVVKAMIRAAKWLDDNNNANRPEAVKILSQSNYVGADYEVIANSMTGTFEYEKGDKREVPDFNVFFRYNATYPYYSDAIWYLTQMRRWGQIAEHKDDSWYMDIAKKVYRPDIYAEAAKELIAEGKMNAADFPDFAKEDGFKPPQTEFIDNVTYDGSKPNAYLNKLSIGLKEKDVL

SEQ ID NO: 36212 - protein, 407 aa, Oceanobacter sp. RED65
MALYVHKYGGTSVGSIERIEGVAQKIKHFKEDGHDVVVAVSAMSGETNRLIGLAKEITDTPSAREMDVLVSTGEQVTIALLSMALEKIGVPAKSYTGSQIRMLTDSAFGKARIEHIDTDSIRSDLDEGKVVVVAGFQGVDAQGNITTLGRGGSDTTGVALAAALKADECQIYTDVDGVYTTDPRVVEKARRMEKITFEEMLEMASLGSKVLQIRSVEFAGKYQVPLRVLHSSKEGNGTLITIEDDNAVEKPVISGIAFNRDEAKLTVMGVPDIPGVASKILGPVGAANIEVDMIVQNVAADRTTDFTFTVHRNDFAKAQGVLNEVAQELGAREVAATDDIAKVSLVGVGMRSHAGVASKMFEILANENINIQIISTSEIKISVVIEEKYLELAVRALHTGFDLDDEK

SEQ ID NO: 36213 - protein, 204 aa, Oceanobacter sp. RED65
MILTTLINGVQNHQPRTLEISELAQAAVLVAVTDAPEPEVILTLRSSEMPTHQGEVAFPGGKCEATDRDVIETALREAEEEIGLNPETVNVVGPMSQVISRYGFLVTPVLAVVPHDVVLSNDSDEIEAYFRVPLSFFIDGEPDNIDKFGSFKGPRWQFQSFTIWGLTAVMLAEMLNEFCGTQLELAIGHIQDHMDQLIKNNKEG

SEQ ID NO: 36214 - protein, 574 aa, Oceanobacter sp. RED65
MEMLSGGEMLVRSLHEEGVEYIYGYPGGSLLHVYDAIYQQSAVKHVLVRHEQAAAHMADGYARASGKPGVVMVTSGPGATNTITGIATAFTDSIPMIVISGQVMSHLIGDDAFQETDMMGISRPIVKHSFSVTDPRDIPEIVKKAFYIATSGRPGPVVIDVPKDMTMPNERFEYEYPKKVKIRSYTPPTKGHAGQIRKAVELMVNAKRPIIYSGGGVILGGAHEQLRKLTRELNAPITQTLMGLGAYPATDRQSLGMLGMHGSYEANMAMHHADVILAVGARFDDRVTNSTAKFCPDATIVHIDIDPSSISKTVEVDVPIVGPVDSVLNDMLDILSKMKERPDADALASWWKQIEEWRKRHGGHYDKNDNGLLKPQEAIEGLWEATNGQAYITSDVGQHQMFAAQYYKFDEPNKWINSGGLGTMGFGLPAAMGIKLNYQDDMVVCVTGEGSIQMNIQELSTCLQYGIPVKIFCLNNGYLGMVRQWQDMNYEGRHSSSYMESLPDWTKLVESYGHVGINVETKDQLKGALDDCFNKYKDRLVFVNVAVDPEEHVYPMQVPMGAMRDMWLSKTERT

SEQ ID NO: 36215 - protein, 289 aa, Oceanobacter sp. RED65
MEKIGFIGIGLMGLPMCQRLLAAHCDLTVYNRTPSKTQALQEQGAKAVDSIESLVSSVDIIMLCVSDTLAVESVMAEALPYLKPKQIIVDFSSISPAATRQLATSVEAKQCAWIDSPVSGGVAGAEAGSLAIMVGGDTHILKTIEPILQNLGQRITHMGPNGAGQTSKICNQMLVSCNVLVMAEVMALAKKSGVDAARLPEALKGGFADSLPLQLTGPRMAEQDFDEVKWKVKTLLKDLDMANTLAHDMTSSVPMAGLGAELMRQHAARGFAEQDPSTLVMLYEALLEK

SEQ ID NO: 36216 - protein, 399 aa, Oceanobacter sp. RED65
MKFVDEASIVVEAGKGGNGCMSFRREKYVPKGGPDGGDGGHGGSVILVADDAVNTLVDYRYVRRYKAETGQDGMGREMSGKKGEDTYLRVPVGTTVIDEDTMETLGDLTEQGQELKVAQGGTRGLGNIHFKSSVNRAPRQTTKGTMGESRNLKLEMKVIADVGLLGLPNAGKSTFIRAVSAAKPKVADYPFTTLVPNLGVVSVAKHKSFVVADIPGLIEGASEGAGLGIRFLKHLVRTRILLHIVDMNPYDGSTPADNAKAIINELDKFSPELAERERWLVLNKLDLVPEEEREERCQAVIDELGWQGPVYKIAAISKQGTQQIVFDIMSFLDEKAQAMAEDPSLKEAEEAHRNLVEKEARDRMEELADRRKSQRAARKAAKQNDDDNDDGPEFIYTYE

SEQ ID NO: 36217 - protein, 103 aa, Oceanobacter sp. RED65
MYAVVVTGGKQYRVEEGQTLKVEKIETATGETVELEKVLLVGNGDDVKIGQPVVEGAKVTAEVVAHGRHKKVKIIKFKRRKHHMKQMGHRQWFTELKITGISA

SEQ ID NO: 36218 - protein, 644 aa, Oceanobacter sp. RED65
MAKNLILWVIIAAVLLTVFQKLDSPVSNQEIAYSQFIERVQSGQVKKVTIAGASITGEYNNGQRFETIRPGHDPKMMDDLLEHNVEVQGKKPEQQSIWTQLLVASFPILVIIAVFMFFMRQMQGGGGGKSGPMSFGKSKAKLLGEDQIKTTFTDVAGCDEAKEDVQELVEFLRDPAKYQRLGGQIPRGVLMVGQPGTGKTLLAKAIAGEAKVPFFSISGSDFVEMFVGVGASRVRDMFDQAKKQAPCIIFIDEIDAVGRSRGVGIGGGNDEREQTLNQLLVEMDGFEGNDGIIVIAATNRPDVLDPALMRPGRFDRQVVVGLPDIRGREQILKVHMRKVPVTDDIDAKVIARGTPGFSGADLANLVNEAALFAARANRTTVTMEEFEKAKDKIMMGAERKSMVMSDKEKENTAYHEAGHAIVGRLVPEHDPVYKVSIIPRGRALGVTMFLPEEDRHSISKRGIESNICSLYGGRIAEEMTLGKDGVTTGASNDIERATQYARNYVTKWGLSEKLGAQLYAEEDQNAYLGSSGGGQLSHLSDETARTIDAEVRDLLDRCYKTAYQLLEENRDKLELMKDALMEYETIDTDQIDDIMNGQKPRPPKSWSDDDGDKGGAGADATEETESKLDEDSSEDNQGKPASEH

SEQ ID NO: 36219 - protein, 571 aa, Staphylococcus epidermidis
MKKENPLFFLFSKIKWPKSLFIIAIIISSIGSITEIIVPLLTGNLIDLLVKQTLELKFIVFLILMFLLDAIFSGLGLFLLIKVGEKIIYSIRSILWKHILFLNTSFFDKNESGQLISRITDDTSLINNFISQKLPAIIPSFITLIGSITMLFIMDWKMTLLTFIIIPIFLMVIIPLGNIIEKLSFKTQQKVADFTGTIGRVISAIRLVKISTNEEFELNNTKEKLSSIYKLNIKHAKIIAILQPFTSILLLVMIGIILSYGGYRIAVGAITSGTLVSMIFYVIQLSSPISEISTLITEYKSSKGASKRIYGILNEPVEENKVNLENIPQNKELIFNSVYFSYDSKNVLENVSFAVPINKKTAIVGPSGSGKSTILNLISRLYKADSGGIYYGGHSIYDIDLKKWRIKLGYVMQNNIMMNGSIRDNILYGVSNNISDDELEYYSILANSHDFISNLPHQYDSQIGESGIKLSGGQKQRINIARNLIKNPDILLLDEATASLDSESEKKIQNALNNLFQNRTTIIIGIAYRLLRTADQIIFLDNGKITGIGTHHYLIKNHNKYNTFVSNQSIN

SEQ ID NO: 36220 - protein, 538 aa, Oceanobacter sp. RED65
MLVLQWNEDYGKRPTQVAEPITRLTSPVQEVDIPTDTSDADSDAPVVQDNMDAPQTQTQATTEWIKVETDVLDIRIDPVGGDIVYAALKQYPLSVDQQDVPFVLLEQSNIRTYIAQSGLVGKNGIDKKGRAQYSVEKTEYNLADGQDQIQVVLATTQNNVKIEKVFTINRGEYLIDVGFRIDNQSQEPWQANFYAQFKRDRSVDPSSMESMGMASFLGAAVTRPSERYFKMDFDDIEEDPFKEKIEGGWIAFLQHYFLGAWVPSKDEAHVYNTRKASGHYLVGYYDSALQVEPGTQGGTSTQLYLGPKDQDRLAEIAEHLDLTIDYGWLWWVAQPLFWLLQLMHDIAGNWGWAIIMLTILVKLAFFPLSAASYRSMANMRRVAPKLTAIKEQYADNREQLSKEMMNLYKKEKINPLGGCLPILVQMPVFIALYWVLMESVELRQAPFMLWIEDLSLKDPYFILPLIMGASMFVQMQLNPTPPDPMQAKVMKLMPVVFTVFFLFFPAGLVLYWVVNNLLSIAQQYYITRKIEAEAANKS

SEQ ID NO: 36221 - protein, 420 aa, Oceanobacter sp. RED65
MENQIFQLQYAMDTFYFLVCGALVMWMAAGFAMLESGLVRSKNTTEILTKNVALFAISCTMYLICGYEFMYDGGFFLSGVETVSTFDLEGALAASAEEGFDGGAVYSGASDFFFQVVFVATAMSIVSGAVAERMKLWAFLAFAVVMTGFIYPMEGSWTWNGDSVFGLFELSYSDYAGSGIVHMAGAAAALAGVLLLGPRKGKYGANGQVNAIPGANLPLATLGTFILWMGWFGFNGGSTLKLGGMEVANEVANVFLNTNAAAAGGLIGALILARILFKKADLTMALNGALAGLVAITAEPADPTPFQATIIGAIGGLIVVLSILALDKIKIDDPVGAISVHGVVGLFGVMVVPFTDADATFGGQLMGALTIFVWVFVTSLIVWGIIKAVMGVRVSEEEEYEGVDLAECGMEAYPEFTKNS

SEQ ID NO: 36222 - protein, 322 aa, Oceanobacter sp. RED65
MSFNYIESIQRTIADERDAVDQLLKNLNHEALNTACDLLLNCQGRIVVTGMGKSGHIGNKIAATLASTGSPAFFVHPGEAAHGDMGMITEQDVVIALSNSGESSEVTTLIPLLKRLNVPLISMTGNDTSTLATGADSHINVGVEKEACPLDLAPTSSTTVALVMGDALAIALLEARGFTAEQFAFSHPGGSLGRKLLLKVKTIMHCGSQIPQVKPDTLVKDALIEMTQKGLGMTTVIDEHGQLSGIFTDGDLRRTLDKDIDFHTTPVQAVMTTGVTTIDPERLAAEALQVMEEKKINALVATENGKVAGVINMHDLLRAGVI

SEQ ID NO: 36223 - protein, 552 aa, Oceanobacter sp. RED65
MYIYDEYDQKIVNERVSQFRDQTQRYLDGKLTEEQFLPLRLQNGLYVQRYAPMLRVAVPYGLLSSEQARKLGHIARTYDKGYAHISTRTNVQFNWPELAAVPDILAELASVQMHAIQTSGNCIRNTTTDQFAGVVPNELVDPRPYCEIIRQWSTFHPEFAFLPRKFKIAVNSHESDDRAATLLHDIGIKIVRNEQGELGYAFYVGGGLGRTPIVASLVKEFVAEKDLLTYLDAVLRVYNLHGRRDNKYKARIKILVKALGVDAFRDKVDAEWQHLKGGPGTLTQEELERVKGHFTAPNYETLDENTELQKQLSENKAFANWYNRNVNEHKVKGYAIVTLTLKKLGVPPGDITDRQFDSVADLADKYSFGEIRNTHEQNMVLADVKQDDLFELWQQAKELGFATPNLGLLTDMICCPGGDFCALANAKSIPVAEALQAKFDDLDYLHDLGDLDLNISGCMNACGHHHIGHIGILGVDKKGEEFYQVSLGGSSGPDASVGKILGPSFAREEMPDVIEKVLSVYVRNRIEGERFIDTYRRIGHSPFKEFVYAKSH

SEQ ID NO: 36224 - protein, 379 aa, Oceanobacter sp. RED65
MLIGVPKEIKNHEYRVGLTPAGVRELTSAGHDVVVETNAGLAIGLDNAQYESAGAKILDSAEAVFEQADMIVKVKEPQPNECKMLREGQLLFTYLHLAADKPQTDLLMASGATCVAYETVTDAHGGLPLLAPMSEVAGRLAPQEGAACLKKANGGSGVLIGGVPGVSPAQVSVIGGGVVGLNAARIALGMGANVTILDRSLARLKEIDDMFGDKLNTLFSTEEAIREQIKIADMVIGAVLIPGAAAPKLISKDMLSTMKPGSVLVDVAIDQGGCFETSKPTTHQEPTYEIDGVIHYCVANMPGAVARTSTFALTNATLPYVVQLANKGKDALAANPHLLEGLNVHKGQLTCEAVAEAFNYDFVTPAKALGLSGNVQKIA

SEQ ID NO: 36225 - protein, 299 aa, Oceanobacter sp. RED65
MSEQKCGYIAIVGRPNVGKSTLLNNILGQKLSITSRKPQTTRHQILGMKTTANVQAIYVDTPGLHEGYSEKALNRYINKVATTAINDVDLVVFLIDRTKWMPEDQSVLEKIQASKVPCILVINKLDHLADKQSLLPYLEEVSQRHDFKEVFPISAKTGYNVAELEAAIARQLPEGMHFYDEDQFTDRSARFLAAELVREKIMRLLGDELPYSMTVEIEQFEESENLITIHALILVERDGQKKILIGDKGERIKQIGRAARLDMEDMFGMKVMLHTWVKVKSGWSDDERALKSLGYNDLD

SEQ ID NO: 36226 - protein, 168 aa, Oceanobacter sp. RED65
MSKAIIVLDRDGVINYDSDDYVKSVEEWIPLPRSMEAIGKLTNAGYEIAIATNQSGIARGYFDLNTLNAMHKKMVDLASEHGGTIQYIHFCPHGPDDHCDCRKPKAGLIDQIERKANQSIAGSYMVGDSLRDLEAGVSKGLKPVLVLTGKGQRTLDKGVDLEHLQVFD

SEQ ID NO: 36227 - protein, 406 aa, Populus suaveolens
MGTNFNFKSFTNDPSDAGGGRPPGNFPLASQSSIYSLTLEELQNTMGGSLGKDFGSMNMDELLKSIWSAEETQTVATATPAGVQDGVGLQRQGSLTLPRTLSLKTVDEVWKDMSKEYAINGTSAGVANNVPQRQPTLGEITLEEFLVRAGVVREDIPVAAKVNTNGGFFGDLSRVANNSSAIGFQQNRGVGLSNNNTNQISLQSSNLPLNGNGFRSNQAQVQQQQQQIFPKQPNMGYVTQMPPQSSPGIRGGILGIGDQGINSNLMQGGGMGVVGLGVATGSPANQLSSDGIGKSNGDTSSVSPVPYVFNGSGRGRRAGGAVEKVVERRQRRMIKNRESAARSRARKQAYTMELEAEVAKLKAENEELQKKQAEMMEMQKNQVMEMMTLQQGGKRRCLRRTQTGPW

SEQ ID NO: 36228 - protein, 205 aa, Petunia x hybrida
GVVENAINTETRMGASLIRLHFHDCFVDGCDGGILLDDIPGTFQGEQTSPPNNNSARGYEVISQAKQSVKDTCPNTPVSCADILAIAARDSVVKLGGQTYNVALGRRDARTANFTGALTQLPAPFDNLTVQLTKFSDKNFTDREMVALVGAHTVGFASCATVCVSNNVNPAALLSCNCSVTQNNTNLQQLDITPNVFDRVYYQDL

SEQ ID NO: 36229 - protein, 311 aa, Fagus sylvatica
WDLIWFGFGSVIGAGIFVLTGQEAHDHAGPAIVLSYVASGVSAMLSVFCYTEFAVEIPVAGGSFAYLRIELGDFAAFITAGNILLESVVGTAAVARAWTSYFTALLNRPHESLRIHTNLTSGYNLLDPIAVAVLAIAATIAMISTRKTSYFNWIASAINTVVIIFVLIAGFAHAKTSNLKPFMPYGAKGVFQAAAIVYFAYGGFDNIATMAEETKNPARDIPIGLLGSMSIITVIYCLMALSLVMMQKYTEIDRGAAYSLAFQSVGMKWAKYLVALGALKGMTTVLLVGALGQARYTTHIARAHMMPPWLA

SEQ ID NO: 36230 - protein, 311 aa, Fagus sylvatica
WDLIWFGFGSVIGAGIFVLTGQEAHDHAGPAIVLSYVASGVSAMLSVFCYTEFAVEIPVAGGSFAYLRIELGDFAAFITAGNILLESVVGTAAVARAWTSYFTALLNRPHESLRIHTNLTSGYNLLDPIAVAVLAIAATIAMISTGKTSYFNWIASAINTVVIIFVLIAGFAHAKTSNLKPFMPYGAKGVFQAAAIVYFAYGGFDNIATMAEETKNPAKDIPIGLLGSMSIITVIYCLMALSLAMMQKYTEIDRGAAYSLAFQSVGMKWAKYLVALGALKGMTTVLLVGALGQARYTTRIARAHMMPPWLA

SEQ ID NO: 36231 - protein, 311 aa, Fagus sylvatica
WDLIWFGFGSVIGTGIFVLTGQEAHDHAGPAIVLSYVASGVSAMLSVSCYTEFAVEIPVAGGSFAYLRIELGDFAAFITAGNLLLESVVGTAAVARGWTSYFTTLLNHHPDSLRIHTNLTSGYNLLDPIAVAVLAIAATIAMISTRKTSYFNWIASAINTVVIIFVLIAGFAHAKTSNLKPFMPYGAKGVFQAAAIVYFAYGGFDNIATMAEETKNPAKDIPIGLLGSMSIITVIYCLMALSLAMMQKYTEIDRGAPYSLAFQSVGMKWAKYLVALGALKGMTTVLLVGALGQARYTTHIARAHMMPPWLA

SEQ ID NO: 36232 - protein, 443 aa, Fagus sylvatica
TIAIFATIQATGVTILTISTLIPSLRPPKCAAETVPPCVPANGMQLGVLYLALFLTALGTGGLKSSVSGFGSDQFDDLDKEEKIQMTNFFNWFFFFISIGSLCAVTILVYIQDNLGREWGYGICVCAIVLGLVVFLSGTRKYRFKKLAGSPLTQIITVFVAAWRKRHLELPSESSLLFNVDDIHDEGQRKKKKQRLPRTKQFRFLDKAAIKDPEMASTGIAVVNKWYLSTLTDVEEVKLVIRMLPIWATTIMFWTVYAQMSTFSVSQATTMDRHIGSFQIPAASLTVFFVGSILLTVPIYDRIIVPVAGKVLKNPHGLTPLQRIVVGLVFSIFAMVAAALTELKRLKAARSHGLTDHPTAEIPLSVFWLVPQFFFVGSGEAFTYIGQLDFFLRECPKGMKTMSTGLFLNTLSLGFFVSSLLVTIVHKVTGNKRPWLADNLNQG

SEQ ID NO: 36233 - protein, 143 aa, Fagus sylvatica
DVRLKWLGLFHRRKHHYGRFMMRLKLPNGVTTSAQTRYLASVIRKYGKDGCADVTTRQNWQIRGVVLPDVPEILKGLVEVGLTSLQSGMDNVRNPVGNPLAGIDPHEIVDTRPYNNLLSQFITSNSLGNLAITNLPRKWNVCV

SEQ ID NO: 36234 - protein, 178 aa, Fagus sylvatica
QKDVNWPLGWPVGGYPGPQGPYYCGIGADKAWGRDIVDAHYKACLYAGVNISGINGEVMPGQWEFQVGPSVGISAGDELWVARYLLERITEIAGVVVSFDPKPIQGDWNGAGAHTNYSTKSMRNDGGYEVIKKAIGKLGLRHKEHIAAYGEGNERRLTGRHETADINTFLWGVANRGA

SEQ ID NO: 36235 - protein, 208 aa, Fagus sylvatica
PAVMFLFSFVSFYTSSLLSECYRTSDLVSGKRNYTYMDAVRSILGGAKVKACGFIQYLNLFGIAVGYTIAASISMMAIKRSNCFHESGGENPCHMSSTPYMIMFGITEILLSQIPDFDQIWWLSIVAAVMSFTYSSIGLALGIAQVAATGTLKGSLTGISIGAKVTQTQKLWRSFQALGDIAFAYSFSVILIEIQDTIKSPPSESKTM

SEQ ID NO: 36236 - protein, 230 aa, Fagus sylvatica
IPEAWQNDKNMDPDRKALYEYFSALMEPWDGPALISFTDGRYLGATLDRNGLRPGRFYITHSGRVIMASEVGVVDIPPEDVCRKGRLNPGMMLLVDFEKRIVVDDDALKQQYSLARPYGEWLKRQKIELKDIVDSVHESERALPLIAGVIPASSNDDNMENMGIHGLLAPLKVFGYTIEALEMLMLPMAKDGVEALGSMGNDTPLAVMSNREKLTFEYFKQMFAQVTNPP

SEQ ID NO: 36237 - protein, 230 aa, Fagus sylvatica
IPEAWQNDKNMDPDRKALYEYFSALMEPWDGPALISFTDDRYLGATLDRNGLRPGRFYITHSGRVIMASEVGVVDIPPEDVCRKGRLNPGMMLLVDFEKRIVVDDDALKQQYSLARPYGEWLKRQKIELKDIVDSVHESERARPLIAGVIPASSNDDNMENMGIHGLLAPLKVFGHTIEALEMLMLPMAKDGVEALGSMGNGTPLAVMSNREKLTFEYFKQMFAQVTNPP

SEQ ID NO: 36238 - protein, 253 aa, Staphylococcus xylosus
MPSTLEIKDLHVSIEDKEILKGVNLTINTGEIHAVMGPNGTGKSTLSSAIMGHPSFEVTKGEVILDGVNILELEVDERAKAGLFLAMQYPSEITGVTNADFMRSAINAKREEGEEINLMQFIKKLDKEMDYLDIDQDMAQRYLNEGFSGGEKKRNEILQLMMLEPKFAILDEIDSGLDIDALKVVSKGINQMRGDEFGSLIITHYQRLLNYITPDHVHVMYGGKVVTSGGPELAKRLEEEGYEWVKEEYGATE

SEQ ID NO: 36239 - protein, 322 aa, Capsicum annuum
MSISNNSFAAVAAIFSLVLLCSMQCHAQLSSTFYDRACPNALNTIRKSVRQAVSAERRMAASLIRLHFHDCFVQGCDASILLDETPTIVSEKTALPNLGSVRGYGIIEDAKRELEKTCPGIVSCADILAVAARDASTLVGGPSWTVKLGRRDSTTASHTLAETDLPGPFDPLTRLISGFAKKGLSTRDMVALSGSHSIGQAQCFLFRDRIYSNGTDIDAGFASTRRRRCPQEDQNGNLAPLDLVTPNQLDNNYFKNLRQRKGLLQSDQVLLSGGSTDDIVLEYSNSPRAFASDFAAAMIRMGDISPLTGSNGIIRTVCGAIN

SEQ ID NO: 36240 - protein, 365 aa, Acidobacteria bacterium Ellin345
MFVDEAKIRVKAGNGGNGIVAFRREKFVPRGGPWGGDGGRGGDVIMESSERHNTLVHFRFNPEYKAERGRHGEGANKTGREGVDVLLKVPVGTLVYDDETGELLHEFVHPDERIIIARGGRGGRGNAQFATPTHQAPRESEDGKIGDEKFLRLELKLLADVGLVGYPNAGKSTLISRISSARPKIADYPFTTLQPNLGVVVVGEMPHEQSYVVADIPGLIEGASLGAGLGMQFLRHVERTRLIAHLVDVSDASGRPDPVQDYKVITKELASFGSGIEKKPTIIVATKIDVANPDKLKKLTTFAKRSKKAFFAISAVTGEGIEPLKWEMAKRVEAIRAKAQDPVEEADEIEAPKKKRRAPARKSVR

SEQ ID NO: 36241 - protein, 481 aa, Acidobacteria bacterium Ellin345
MGIGAVIGSGIFTVIGTAIAGQKFDTSSILNAPLLDYIIHHTATTGRPGAGPALALSLVLVALVCAFTALCYAELASMIPIAGSAYTYTYATMGELIAWIIGWDLILEYAVSNMAVSVGFAAHLVDAFDWFGWHPNPRWISPAYLPSGLTDLQGGTIYNTGWHFGFNIPAFLIVMLLTVVLVRGIRESAETNNIMVLLKIGAILAFVVAGMKYIHPTNYHPFAPQGWPGVLTGGSIIFFTYIGFDSVSTAAEEAKNPQRDLPIGIIATLVICTVLYIAVAVVLTGIVKWDTLIDDAAPVVNSLKKLGLMSHSKGLHWTRLVVLFGAMMGMISSLLVFQLGQARVWFAMSRDGLLPKLFGRVHPKFRTPSTATWIAGVLVGIPAGILDIGTLADLSNIGTLFAFVLVSLGVIILRFKQPERRRGFRAPGGLTAPILSVVFCILLMSGLPILTWLRFFAWLIIGMSVYWLYSRHRSEFAPVRK

SEQ ID NO: 36242 - protein, 637 aa, Acidobacteria bacterium Ellin345
MNSTVKTVVFWLVIILAGVLLWQVLKQGTSGIKEQDINFSQFLDDVNQTKVAAVTVTGAEVHGKYKDGNSGFHTTVPPNYNDMYKDLRDKGVNITVKDNQGSSWQWILNFAPLILLGALWFFMIRQMQTGGNKALSFGKSRARLLSMNQKKVTFKDVAGVDEAKEELKEIIEFLREAQKFQKLGGRIPKGVLLVGPPGTGKTLLARAVAGEANVPFFSISGSDFVEMFVGVGASRVRDLFEQGKKNAPCIIFIDEIDAVGRHRGAGLGGGHDEREQTLNQLLVEMDGFESNEGVILVAATNRPDVLDPALLRPGRFDRRVVVSRPDVRGREEILRVHSRKIPLADDVDLSVLARGTPGFSGADLANMVNEAALNAARQNRKVVLMYDFEVSKDKVLMGAERKSMLLTDDEKKVTAYHEAGHALVAAKLPHADPLHKVTIIPRGMALGVTMQLPETDKHNYTRDYLETMLAIMMGGRLAEEIFLNQMSTGAGNDIERATELARQMVCEYGMSKLGPLTFGKKEEQIFLGREISQHRDYSEDTAIKIDGEVRRLIQEGYDKAKHVLETGTDVMHAMAKALLEREVLDAIEIKALVEGRPMPNRINPPSGGNATGDDVQQVLRPEPSRPGLQPGERPSPA

SEQ ID NO: 36243 - protein, 258 aa, Acidobacteria bacterium Ellin345
MAIRRSVSTTNKRPRRLSSPATALATAASRRKLVVPKRRAPAVPTDPAFDAHTLLDRLGSGSSGKEFQRNGSLFAQGDLADAVFYIQSGKIKLTVVSKRGKEAVVAILAEGSFFGEGCLAGQPLRMSTASSLQRSTLIRVEKLVMLNLLHKDKVFGERFLAYVLSRNIRMEADLVDQLFNSSEKRLARLLLLLANFGNESKPIPVIAKMSQETLAEMIGTTRSRVSYFLNRFRELGFIDYNGGGMSIHSSLMSVVLHD

SEQ ID NO: 36244 - protein, 531 aa, Acidobacteria bacterium Ellin345
MKIVVAEKIAKAAIDLFKQDPTWNVVTPDQVAQKEQLLEQLKGADALIVRSAVFVDAAMLEHADQLRVIGRAGVGVDNIELEAATRKGIAVMNTPGANAIAVAEHTIGLMLALARFIPRATETMHAGKWEKKSLQGTELRGKTLGIVGLGRIGLEVARRAASFGMTLVAHDPYVSPAIAHDAKIRLADRDEVLAVADYITLHVGLTPQTANMINATTLATMKKGVRIVNCARGELIDDAALAEAVKSGHVGGAALDVFTEEPLKASPYHGVPNVILTPHIGGSTAEAQDAVGVQIAHQVRDYLQRGVVQNAVNMPSLTEQEYVALEPFITLGERLGSLLAQLAESRFEEIGIRYTGPLADWKTELIRNASIKGILQHTTDESVNVINANSVAETRGIRVHESKKEHPSSGAAANVLGLTVTTPKGTLSVRGTVLHGNSPRLLSFDNIDVEAPLEGTLLVIRNRDIPGVVGRVGTILGEHEVNIANFALGRPSGNSGGNAIAAVQVDGPLKEPVLQQLRQQKAILAANVVQF

SEQ ID NO: 36245 - protein, 583 aa, Acidobacteria bacterium Ellin345
MAEIKNPQQEPGSERKLLLIFALTFIMIVIGQTVFFKNIPKKQDDKNQKSAPVAAQTSQPAASAPAVATPAVAKQAQAETETVVENAVSRIVFTNRGAQVKSWVLKNYKDDHGNPLELVNREAAKQFGYPLSFFTYDQGLTTKLNDAMYVASATGRIEVPGELTFEFSDGDLSAKKTLRFTNGYVVGVETSVTRGGSNVTALPAWPSGFGDDVQPTSYALQAIAYENSGEVERQTGKKIVGGATLRGPFNWAGAQDQYFAALFLPDNPPAASMVTLHNTLKIPADLDKPDPNKTQPVDVIGSAVGDLSGPTVTRLFVGPKALHILESVKSNAAPGQPNGPDLSKVVDFGKYLGFIAKPLFLWLRWTHDHWVPNWGWSIIILTVIINLVLLPLRLSSMKSALKMQKIQPQMKAIQEKYKKYKMNDPKRADMNTEMAALYKQHSVNPVGGCLPLVIQMPFLIAFYGMLAVAIELRQANWFWLHDLSGPDHLYIIPVLIVASTILMQRMTPQAGIDPAQQKMMTIMMPAFLGWISLRYASGLGLYWIVGNIIGFAQQFIMNKTELGREIAAVRAKQANKRRLKGKE

SEQ ID NO: 36246 - protein, 553 aa, Acidobacteria bacterium Ellin345
MHEWLPKSVLALRDYSRQRFVADLLAGITVGLVALPLAMAFAIASGVPPQSGLYCAIVAGFLVSACGGSLTQIGGPTGAFVVVVYNIVAKHGIDGLFMCTLEAGVILVLLGITGLGSAVKFIPRPVVVGFTNGIAVIIASTQIKDFFGLKIEKVPGDFLDRMEVLGKNFRTLSVEETCIGLLALAIIIAFMRYVKRVPGYIVALVAGTAAVLLLHLDVQTIGTRFGGIPSGLPKLEIPQFHANLLRPLISPALTVAMLGAIESLMSAVVSDRLSGDKHNPNVELVGQGIANIFSPLFGGLPATGAIARTATNIRSGATSPVAGMIHSATLLAIVVFAAPAAKFIPLAVLSAILFVVAYNMGEWREIPQILKLSKLEIGTWLASFLLTVFADLTTAVEAGMIMAVLVFIRRVSLTTTVSMVTEEYVKAGHAHILQNKDIPGYVAIFRIHGPFLFGTTEKMEEITSRIDELPPVVIVRLRNMTAIDATGIQALETAIEAIRRTGRKVLLCGARRQPKELIEQSGLGAHVGEENMLNSISDALERAKALQTSVVHA

SEQ ID NO: 36247 - protein, 567 aa, Acidobacteria bacterium Ellin345
MSPLLASFVADRLVNLSSTDLVIIVFYFALVLAIGWQLKGQAKTGEDFFMAGREMTAWIAGLSFLSANLGSLELMGWAGAAYQYGILAAHWYWIGAIPAMIFLGLVMMPFYYISKTHSVPGYLKLRFGEPSRALSAVSFAFMTVLMSGINMYSMALVMKVVLGWDINVSIIVSSITVAIYVTLGGLRSAIFNEVLQFILIWAGALLIPIMGLIEAGGWTNLKAQITRNASAEYTHLWSTLGKFSDNPMGINWIGIVFGLGAIISMGYWTTDFLVVQRVLAAKDMRSAKMAPIIGAAFKMLVPFIVILPGLLALAVLPMKLVGESQAIATHGHSYNEVLPLMLARYCGPGLLGLGITALIAGFMSGMAGNVSAFTTVWTYDIYRAMIKKDASDAHYVNMGRASTIGGVIISILTAYFVMKFASIMDYVQALFSFFIAPLFATVVLGMLWKRATNAGGFWGLLAGTVSSVGMYAWVKLDPSALRYVAMSPDAQAMAENMYRALWSCLICALVTVVVSYATKPRPDAELVGLVKSVTPIPSEGDVPMYMRPAFWACVVAVGFIILQIIFW

SEQ ID NO: 36248 - protein, 234 aa, Acidobacteria bacterium Ellin345
MSENKVDPGQVLRKVPIFSGLSDVEWNELSQRVVPRKYPNGEMIFSEGDACAGLFVVQSGHIRIFKSSASGREQVLSIDGPGSSVAELPVFDGGSYPASAVAVTDCTLLFLSKQDFHALCMKYPEMALKVLRVVGGRLRRLVGIIEELSFTTVRHRLVALLLRLAKTEGNKTEQGITITLPAHNQELAAQIGTVRELVSRNMSRLQQEGMIEQDGRTVILKDPMGLQRTLEEAG

SEQ ID NO: 36249 - protein, 417 aa, Acidobacteria bacterium Ellin345
MSTNGNGNKAVKLPIYMDNHATTPMDQRVLDEMLPYFIEKFGNAASRNHEFGWVAEQAVDQARERIAKVIGATSKEIIFTSGATESDNLAIKGVAQMYREKGNHIITQVTEHKAVLDTCKRLEKEGFRVTYLPVQKDGRIDLDDLKRAMDDKTILVTIMAANNEIGVLQPIREIGALCHEKGVVFHTDAVQIIGKVPFNVIQDNVDLASISGHKLYGPKGVGALYVRRKNPRVQLVAQIDGGGHERGMRSGTLNVTGIVGLGKAIELAGQEMAEEGKRMTALRDRLKDKIFSELDEVYVNGSWEHRLPGNLNISFAFVEGESLLMGINDIAVSSGSACTSATLEPSYVLKALGAGDDLAHSSIRFGLGRFNTDAEVDYVANKLIDVVKRLRELSPLYEMHKEGIDLTKVQWAAEGGH

SEQ ID NO: 36250 - protein, 399 aa, Acidobacteria bacterium Ellin345
MSSATSQLTLSPAARMNRIEISATLAVVNEAEKLRSAGVDLVDFGAGEPHFGTPQHIREAAIAAIHNNFSKYTAVAGTAELRDAIAKRHATDFATDYKREEVIASVGGKHALFNAIQVLVDHGDEVIIPVPYWVSFKDMVQYSGGKPVFVEADESQNFRLTAAMVEKAVTPKTKLIILNSPSNPSGAVMAPEDMKSIARFAYERGIWVISDECYVYLNYTGEEFSLGSLTEVKERLLVVGSLSKTYAMTGWRLGYTLAPAAVVSQMQKLQSQSTSNPTSIVQKAAVAALNGPQECVAEMRADYIKLRDEIVSGLRSIPGVKCTMPQGAFYAYPDISCAFGKAGMNSAADVAKKLLHEAHVVSVPGEAFGTTKHIRLSYAASHENVARGLERMHKFFASL

SEQ ID NO: 36251 - protein, 379 aa, Acidobacteria bacterium Ellin345
MATTLSKVADLAGPGIGNYTELEKILPKDYHSLLDRKQTQKAIYAVKTYIEEHLCQELNLIMTSVPLIVDMESGVNDYLDRDGSRTPITFHIPNDHDVHPIDAQVVQAATKWKRMALKQFDMKPGEGLCTDMHAVRKDYFLDHDHSVYVDQWDWERTITAQQRSLEFLKTIVSKIWTVIVGAERFALNKFPELNDPRCPKLPEKLTFLHAEDILEMYPDLPRKQRETMILQKYPAVFIIGIGWTLKDGYPHEMRAADYDDWVTETESAEGKMMHGLNGDILVWNPVTKRRHELSSMGIRVNAETLKQQLKATNQEHFLNFPYHKAILDGTIPLSIGGGIGQSRTLMQILRKAHLGEVTVSVWPKILKEICAKKNIFVLE

SEQ ID NO: 36252 - protein, 398 aa, Acidobacteria bacterium Ellin345
MEKLIYFDNAATGWPKPENVYRFMDEFYRTHGVNPGRSGYDLAMETGSMVDRSRKRLTKFFGGDEDAPDRLVFTSNVTDALNLVIPGLVGHGDHVVTTNLEHNSVIRPVNHMVRDCGAEATYVPFKAHGFIEPEAIAAAIRPNTKAVVVNHGSNVIGTVQPVADIGKICRERGVTFVIDTAQTAGVVPINMRAMNVDVVAFTGHKALMGSVGIGGLCIRKHVEVKRVRSGGTGVRSVDPYHLEEYPWRLEYGTPNLVGIASLWAGQDWLDEHGVEMVHAREMKLAKKLVDGFRQVEGVTLYCCENLANHLPTILMNIDTMDPGDVGVMLDVDYNIAVRTGLHCAPLVHTQLGTVKRDGGVRFSIGAFNTEEEVDAAIHAVSEIAKWAMSRSAKSRVTA

SEQ ID NO: 36253 - protein, 644 aa, Acidobacteria bacterium Ellin345
MAKIIGIDLGTTNSVVAVMEGGEPKVIPNEEGGRTTPSVVGFTKTGERLVGQVAKRQAITNPENTIFSIKRFMGRRYNEVNEEMKMVPYKVQQAGDHVAVLAQGKEYSPAEISAYILQKLKKAAEDYLGETVTEAVITVPAYFNDAQRQATKDAGKIAGLDVKRIINEPTAAALAYGLDKKKDETIAVYDFGGGTFDISILEVGEGVIEVKSTNGDTHLGGDNIDQRIVEWLIDEFKKKEGLDLRAKGNEMALQRLRDGAERAKIELSTTMETEINLPFITADASGPKHLVERLTRSKLEEMVRDLVDRSIEPCRQALKDAGIDASKIDEVVLVGGQTRMPRIQQVVKEFFGREPHRGVNPDEVVAIGAAIQGGVLKGEVKDLLLLDVTPLTLSIETLGGVATPMIPRNTTIPTKKTETFSTAADNQNSVEIHVLQGERPMAGQNRTLGKFHLTGLPPAPRGVPQIEVTFDIDANGILNVTAKDNATGKDQKITITSSSGLSKEEVERMAKEADAHAAEDKAKKEEIEARNQLDGMVYQIEKMLKENGDKISPSERGDVENALADSKKALETNDAKQMNAARERLTAASHKLAEAMYKQAAPGAGAPGAGPGPEAAGGAQQAQAEPKKDEGVIDAEYVDVDEKK

SEQ ID NO: 36254 - protein, 245 aa, Acidobacteria bacterium Ellin345
MAETHPIMAARVTRSILLSEKTKHIEFEFLDRPKFDFIAGQFVSVREPKADGKFITRAYSIASDPRDDNTLDLCLNRVENGFMSNYLCDREVGDEVRMHGPHGHFVLHEELKDTIFISTGTGVAPFRSMGRWLFQHPERYKGREFWMIYGTRYADDIYYRDEFEQMEREHPNFHYVCTLSRGGDAWTGRKGYVQDHLREILKAHDGGKDMQVYICGLNEMVSGVRDVLKDEFGWDKKQINFERYD

SEQ ID NO: 36255 - protein, 338 aa, Acidobacteria bacterium Ellin345
MLPSSVQLTIMSKTGENVVRIEAEALRELADRIAGPMAADFQRAVDLLACCGGRVVVSGMGKSGLIGRKMAATFSSTGAPALFLHPAEAMHGDLGMIARGDVVIALSASGETEEILNLLPTIKRLGAPVITMTCDNLYANGAKRSTLAQAADVALDCSIAQEACTLGLAPTASTTTMLALGDALAMALAEKRGFKEEDFANLHPGGKLGKRLTKVSALMHAGDAIPRVTAETKMSDVIYEMSRKKLGVTTVVKGEKLLGIISDGDLRRLLEHRGKDVMDLTAGECMTSSPKTIHPEAYATAALDLMEQRKITSLAVVDSNGELKGIVHLHDLWGTEML

SEQ ID NO: 36256 - protein, 286 aa, Acidobacteria bacterium Ellin345
MTMTIGLVCPNESPEKRGVKPFLRWAGSKRKQLSRLAPYWSGEHKRYVEPFAGSACLFFDLAPPSAVLGDSNEELIQLYRVVRDSPERLHRRLCRIKRDVATYLRWRNQNPTTLDPETRALRFLYLNRNCFNGIYRTNLQGGFNVPMGKRVGEYFSKEDLLRCSRLLQTAELVAGDFSATLDLVKVGDFVYLDPPYAVLSRRIFKEYGSKLFGTEDMPRFEESLHAIVGRGADFLVSYADCKEARALARKWCSVRLPVKRHVAGFAGDRKTAYEWVISNRQRSTTA

SEQ ID NO: 36257 - protein, 445 aa, Acidobacteria bacterium Ellin345
MSKAQQLVRSVGLFDATMLVMGGIVGSGIFINPYVVAQQVHTAPLILGAWLAGGVIATLGAFIYAELAGRQPSVGGQYAYLRDAIHPLAGFLYGWVLLLVIQTGGMAAVTVTFARYFLVLTHWAVPERVVAVVTLSLLTLINCLGVKFGSRVQSALMILKIGAIAFLVVAGFLYIREPFAVGGTVLDRPLSPGLLSSFGAAMVPVLFAFGGWQTANFVAGEVRDPRKNLARALLLGVAGVIVLYLAVNFVCVRALGPVGLAATRVPATDVMRLAMAQRGATIVTLGITVSTLGFLSQSILTAPRVYFAMAEDGVFFRAVAKVNEKTHVPILAIVLQSVWTIVVALTGRYEQILNYVVSMDFVFFGLTACTLFVFRKRSSLENGASGGFQVPGHPWTTLVFIAASWLVVTNTIYKYPANSLLGFAILLVGMPVYWLWRRKGKVLSQ

SEQ ID NO: 36258 - protein, 472 aa, Acidobacteria bacterium Ellin345
MRRVVAKLLLGLTLLAFAAPLVSAQTAATPPDRIAQLEAKVTDAKNSADNAWMLVCAALVLMMTAPGLALFYGGLVRKKNVLATMLQSFSMMAIITVLWALILYSLAFGSGSSFIGGWHNAFLHGVGLAPDTDYAPTIPAQTFMIYQLMFAIITPALITGAFAERMKFSAMAVFMVLWSLIVYAPMAHMVWGKGGLLNASLGGRFPTLDFAGGTVVHITSGVSALVCALYLGKRIGYPKEPMPPHSVVLSFIGAGLLWVGWFGFNAGSALSAGTLATSAFVATHFGAAAAVIGWSAAEWLHNGKPTTLGAISGAVAGLVAITPAAGFVSPMSALFIGLLAGAFCFTMVAFAKAKFGYDDSLDAFGVHGAGGTLGAILTGVFASSAINPMFKDARGNPLPSGFIEGNYRQLLNQGVGVVIAWSLAIVGTLAILFLVDKLIGLRVSEEHEVAGLDISLHGEEGYYWEASMSQNS

SEQ ID NO: 36259 - protein, 591 aa, Acidobacteria bacterium Ellin345
MIARLRPLFPYMKKYRGTLLFGAVCVLLNNGVWILFAQVLSRAINDLNLGVSRHKLVTYSFLLLAVAGTKGIFQFLTRWLMIGVSREIEFDLRNDLFRHLEGLSYSYYQRTRTGDVMAKATNDLNAVRMLIGPAIMYSANTFAFMSGALFFMLHISPKLTLYAFAPLPIASIVIQYFSKQIHERFERIQAMFSDITARVQENLSGVRVIRAFVQEDPEIARFEAANDEYIHRSLRLVRLMGMLWPTLELMLGLSIILVLWLGGREVLTHRINLGDFVAFNIYMVQLTWPIIALGWVINIFQRGTASMARIQQIFDEKSEITDADVPFHPPTEVTGTIEFRDLTFAYPPRAEDADKHTDPPLVLKNVNLTVPAGTSLAIVGPTGSGKSTLVNLIPRIYDAAPNSVLIDGRPIREFPLELLRKNVGFVPQETFLFSDTIRENIAFGAPDAPDTEIRAAAEAASIAAEIEEFPESFNTVVGERGITLSGGQKQRTAIARALIRNPKILVLDDALASVDTQTEDRILNHLRRLMQGRTTVFISHRVSTVRNADQIAVLENGQIVELGTHDELVAKNGYYTELYNKQLLEEELETV

SEQ ID NO: 36260 - protein, 66 aa, Acidobacteria bacterium Ellin345
MKGTVKWFNNAKGYGFIGREEGPDVFVHYSAISSEGYKSLAEGDAVEFEIVEGQKGPQAGNVIKAA

SEQ ID NO: 36261 - protein, 461 aa, Acidobacteria bacterium Ellin345
MTAKAEILIVDDEANTLASLSRAFRLAGHEATVCDNAVRALEIAKSKPFDLILSDVVMPGRDGLTLLEDLKTAGVQAPVVMMSGQAHIEMAVKATRLGALDFLEKPLSTDKLLLTVENALKLKRLETENRDLRSRVGKHEIVWKGEAMRRVMAQIDRVAASEARVCIYGETGTGKELAARTLHEKSPRKAGPFITLNCAAVPAELIESELFGHEKGSFTGAAQRHIGKFEQAHRGTLFLDEIGDMPLAMQAKLLRVLEEGEVERVGGDKSIPVDVRVIVATHRNLEDLVKEGKFRQDLFHRVYVFPLILPPLRTRREDIPVLLEHFAAQVCLQNGWKPVPFTAEAVEALQRYSWPGNVREMRNVVERLLLLAVAGEVDRATVELALPEAQTATSDTGSGPLSSRVAQYEREVILAELQRQKHHITNTAKALGLERSHLYKKCQALGIDLRAVRGTAPGAVR

SEQ ID NO: 36262 - protein, 66 aa, Acidobacteria bacterium Ellin345
MEQGTVKWFNDAKGFGFISRQNGEDVFVHHTAIQAQGFRSLQEGQAVQFNVVKGPKGWQAENVQAL

SEQ ID NO: 36263 - protein, 282 aa, Acidobacteria bacterium Ellin345
MKVAFLGLGIMGRPMAANLAKAGNEVTVWNRTPKDVEGAHVAKTPAEAAKHADVVWMCVSDTNAVERVLFGDGGVEPVLRAGMVVVDSSTISPVETLKFAERVRAKGADYIDAPITGSKIGAESAQLIFMVGAKDETLKKLEPLFLQMGKKIVHMGEVGKGQASKISLNLQIACIYEGFIEGFKVATQLGVNPEKFVELVQSTMVRSGVVDYKAPFVLKRDYTPNFPLRLMRKDLLLVSDAAKQLELDLPGLKSVLEVYDEAHEAGMDDQDYAATLALLERN

SEQ ID NO: 36264 - protein, 263 aa, Acidobacteria bacterium Ellin345
MNPIALLGIAYDEKSSFLRGPAEAPAAIRRALASDSANSWSEDGRDTSLMLEDCGDLRGFSKDPISEIETFVAKSVDEFAQVLVLGGDHSISFPSVSAVAKKHGPLTIVHFDAHPDLYDEFEGDRFSHACPFARIMEGDHAKRLIQIGIRTANVHQREQAAKFNVETYEARNWKSQLPAVEGPVYISVDLDVLDPAFAPGVSHHEPGGLSTRELLNAIQSINAPIVATDVVELNPTRDLNDVTAMVAAKVVKELAAAMSRNRI

SEQ ID NO: 36265 - protein, 490 aa, Acidobacteria bacterium Ellin345
MPSTLVECVPNFSEGRNQAVVDEIIAAMKVDGVYLLDREMDADHNRCVITLVGDRTNIAEAAIRGVGKAAELIDLTKHTGAHPRMGASDVIPFIPIEGVTLEDCVAIAKYVGEEIWKRYQIPIYLYESAAQRPERTNLENIRRGQFEGIRDSIATDDARIPDFGERRVHPTAGATVVGARKFLVAYNVYLNTTDVEVAKKVGKAVRFSNGGLRFVKGMGISVRGLAQVSMNLTDTDQTPIARVYEYVKREAARYGVMPLSSEIVGLIPKKSLEDAAEWFLQIENFDSSLILENRLAAVMGGKMSVGGLRAGFEPFVEQLAAPVAAPGGGSASAAAGAMAAGLGSMVAGMSRGKKAYLQYEAPLSEAIGKLASLREEFKAAADADTAAYEEVVKAFRKLKTDPTAQTEVVTALKQATNVPLGVAQNAHLTISILESLRPITNPKMASDLTTGLALARAAREGALANVEINLADMQDAEFAGWVREKVAALK

SEQ ID NO: 36266 - protein, 158 aa, Acidobacteria bacterium Ellin345
MAAPSPNRFPLKKNPKRNSHFAIIRSSRIHAAGVFSTQAIKKGTLILEYDGPRLSKEAADIVYENRKDTYLFGIGDGTQVIDGHSMAMFVNHSCDPNCETAEYDDQIWIQAMRDIEPGEELVYDYYLYDGEEEAPCYCGAKTCRGTMYGVSPSSQKKK

SEQ ID NO: 36267 - protein, 399 aa, Acidobacteria bacterium Ellin345
MSLLMTKTMTELPLARRMARLGTETAFEVLVRARALEAKGKDIVHLEIGEPDFDTPRNVVDAGIDALNKGFTHYGPSAGLPILRQTIAEEVSKTRGVKVTPEEVVVVPGGKPIIFFTMLALADEGDEIIYPNPGFPIYESMINFVGAKAVPIPLREERDFRLDVNELKDLITDRTKMIIINSPQNPTGGVLTKQDIADIADAIGDRDIMVMSDEIYSRLIFEGQHHSIMSLPGMQERTILLDGFSKTWAMTGWRMGFGVMRADLAAHIARLATNSVSCTASFSQMAGVEAIKGDQSSVAAMNKAFLERRDFFIKRVNQIKGFSCRSPHGAFYTFPNITKTGWPSKKLADALLDEAGVAGLSGTAFGSFGEGYLRFSIANSIENIAKALDRIDEWTKHRL

SEQ ID NO: 36268 - protein, 386 aa, Acidobacteria bacterium Ellin345
MNSMQRVYLDNNATTPLLPEVLEAMQPYFLGQFGNASSIHQQGQQARAAVEHAREHVADLIGAREAEIVFTSGGTEGDNLALFGLCKPGDHLIISTIEHHAVLNSAQRLKELGVEVTDVPVDGQGIVDPDAVKRALRANTRLISIMLANNETGVVQNAVEIGKIAAEADVYFHTDAVQAIAKIPVDVNEIRCDLLTLAGHKIHAPQGTGALYVRKGTILDPLFYGGRHERSRRAGTENLPGIVGLGKAAELAMAWFENDGPTRMAALRDRLEQTVVSQLDQLTVNSGSAPRVPNTTNVSFDGIEGEAMVIALDLKGLSVSTGAACSSGAIEPSHVLTAMGLTPEQARGSIRFSVGKQNTEADIQFALERVPEVVAKLRELSPVYRK

SEQ ID NO: 36269 - protein, 567 aa, Acidobacteria bacterium Ellin345
MPEVAQETKAQRVERLKREKNAWERIDEIRTFAREGWDSIPPEWLGTYFRSWGVYTQGDGVGAVGGKGGEGRAVPFFMVRIRIPNGILTTSQLRVIADVSRRYARGIADITVRQNVQLHWVKIEDLPDLLAALENAGLTTLGACGDVTRNITGCPLAGVDGDEIFDASPIALELNRLFVGNAEFYNLPRKFKISITGCRHWCTYPEINDVGLTAVIRRRNGVEEKGFSIRVGGGLSTQPFLGVRLNAFVPYDKAVVTARTIAEIFRDQTVLRESREQARLKFLFLKHGWSADAMLAEVERRLSFHFDPAEPEDLVGDEFRDHIGIHPQRQPGLSYVGASVLRGRTGADQLSAVADLADRYGNGEIRTTTMQNLIFVNVPSAQTGRLAAELEALGLQVEPSPFWRGAVACTGTEFCKLAITETKSFTRWLVDELEERAPEFTEPLRINVTGCPNSCGQHWISDLGLEGKKLKVNGVMQDAYYFCVGGAVGLHQAIARPVGYRCLATDVPDAIARLLSRYLDDKHEAKSLREFLGRHTIDDIRGFLAGTSITGVPRDVAAGPVPHGVEG

SEQ ID NO: 36270 - protein, 391 aa, Acidobacteria bacterium Ellin345
MREVVIVSAVRTPVGKAYKGTLRATRPDDLGAVAIKGALERVPQLDVREIEDVILGCAMPEAEQGMNVARIASLRAGLPVECSAMTINRFCASGLQAIALAAERIRGGGAEVIVAGGTESMTMVPMGGHKFTANPYLVETYPDSYLSMGLTAERLAVRHGITREMADEFSYNSHKKAIAAIEAGRFEDEIVPVPVTFVTPNGSKPKKQEILFKVDEGPRADTTLEALAGLKPAFHVKGTVTAGNSSQMSDGAAAAVVMSAEHAKKLGIKPLARFVAFATAGYKPEEMGLGPVFAIPKALKIAGLKLEDIDVFELNEAFAAQALSVIKEAGIDINKVNPNGGAVALGHPLGCTGAKLTATIIRELKRRNGKYGIVTMCVGGGMGAAGIFENL

SEQ ID NO: 36271 - protein, 313 aa, Acidobacteria bacterium Ellin345
MQRMSISNLLGGWFHPFRRRGHLKVGFLGLGNMGEPMAANLIAAGHQVTVWNRTAAKAEPLKERGVKVATEIKDAVQNQDVVCTMVADDHALRTILEGGLLEALPKGAVHVSHSTVSVAMAEELKREHGKRGQAFISAPVFGRPEAAQAKKLFVVVSGDPAVIEKVKPVLDAIGQGVTVIGNDPVQANVAKISGNFLIAAAMEAMGEAVALVGRYGVDPVQYMEFLTSTLFAAPVYKNYGMKIAKQEYVPVGFKAPLGLKDAKLMIAAGEGKYVPLPLASLIHDQMITAIAHFGEDVDWSVIAKVSAEHAGLK

SEQ ID NO: 36272 - protein, 459 aa, Acidobacteria bacterium Ellin345
MSVSKGKLLVVDDELSVRDSLAKWFREEGYEVTVGESANEALSRVAEQTYDLALLDIKMRGTDGVELQRKLHELVPGLIVIMMTGYASVETAVATLRNGAYDYITKPLDPEETAHLVSKALAHKRTEQENVRLKEQIEEHAHVDLVWRSDAMKKINDAIETVAPTDATVLITGESGTGKEVVARAIHALSTRRFHPMVPVHCGALTETLLESELFGHEKGAFTGAQYRKKGKFEVAEGGTVFLDEIGDISLKTQTDLLRVLQEREIVRVGGNQPIKVDFRIVAATNKDLEKLIEEGHFRPDLFYRLNVFRIELPPLRDRREDIPLLVNHFTKKFAEQMNKRVTRVASPAMNMLQQYPWPGNVRELENAVERAMVVAQEPELRETDFVLKVKAAATMSSTNGTGTPKTLEDIEKEHILHVLDETNWNQTRAAEMLDIDRVTLHHKIKRYGWQKTTTATRD

SEQ ID NO: 36273 - protein, 581 aa, Acidobacteria bacterium Ellin345
MPSLISVNVGLPRDVEWQGNIVHTAIWKKPVSGKVLARRLNLAGDGQGDLAGHGGEHRAVMVYQLDSYRYWQEQLHRDAFEYGQFGENFTVDGLPDTEVCIGDRYRIGSALFEVTQPRVTCYRVGIRMNEPQMAALLVSHKRPGFYLRVIEEGEVSAGDAIVKVADGPEHVTVADIDALLYLPGHSREVLKRALQVPALSNGWKSSLEAMLNSDQPNGSAGLITVAPPPAWRGFRPLRVAEVHRETADVLSFVLASPDGEPLPVPLAGQFLIFKLEPGAHSAPILRNYSISSANGEGTYRVSVKRDSGDGSRYFHDHIHAGDVIQVGAPRGTFTLAHDEKPIVLLSAGIGATPVLSMLYSLVATDTAREIWWCYGARNSQEHPFASEVHALLSKLPNSHSIVAYSKPLETDRPGTDYNDHGHLDRSLLEAHHVPKLADFYLCGPSAFMAQITATLQAWGVPSDCIHSEIFGTVGAITPGIAATTLPPPHPPSGAIGTGHIVAFTRSGLTVPWNEKYKSLLEFAEACAVPVRWSCRTGVCHMCESGLIAGTVKYAPDPLDPPADGNILLCCSTPLSEIELDL

SEQ ID NO: 36274 - protein, 489 aa, Acidobacteria bacterium Ellin345
MCHGSLPCNERMDYTQASASQTLTAANPASNKPEKPTLVRGMSFLDAVLLLVGGIIGSGLFLTSSDVAKTTYTPLIFMSAWIVGGIVSLLACLSVAELGSMFPEAGGQYVYLREAYGDFPAFLYGWMIFSVNVTGSNATIAAGFAAYAGAIIAPLNATRPIFSIGAWTFNMGHATAISAIVFLTWINVVGLRPAVILQNIATWAKFIAIAGFLVLGFLIGHGSWHNATQPIPGHVGFLSLASGFGVALIAVFWVYDGWVYATWVAGEIKDPQRNVPRSLIYGIAIVAAVILAVNVLYLYAMPMQQMAMQDTVGQAAAQILFFPAIGRWFSALVAIACFGAAACSILSGARVYYAMAADGLFFQKLAEVHPRWRTPAFSLIVQCIWSCALVLTGRYDQLFTFVMFISVIAYAAAASSIFVLRRKRPDMPRPYKCPGYPWVPLAYCVICGAWALNALWSKPFESLAGVGIMLIGAPAYIYWHRAKRKPAVL

SEQ ID NO: 36275 - protein, 386 aa, Acidobacteria bacterium Ellin345
MPKLSERALGIKQSEIRVMSVECERVKGINLAQGICDTEVPPPVRQGAHEAIENGNNQYTRMDGIAGLRQAIAKKMKRYNRIERDPETEVVVTGGSTGGYLSTCLALLEAGDEVILFQPYYGYHVHTLETLGVTPRFVNLQPPSWEFKKEELERAISARTKAIVVNTPGNPSGKMFTREELGWIAEIASQHDLFVITDEIYEYFRYDGREHISPATVDRLRERTVTISGFSKTFSVTGWRLGYVVADAKWTNAIKYFSDLAYICGPSPLQWGVMMGIDELGDEFYDELNAEYAQKRRLLCDTLHEVGLTPFEPQGSYYVLADASSLPGKDSKERAMHLLHTAGVATVPGESFMKSGGETLLRFCFAKRMEELEEACRRLEGVRANV

SEQ ID NO: 36276 - protein, 618 aa, Acidobacteria bacterium Ellin345
MSPVPEKKKKDTKEQFRNVAPLLWELVRPRRALLLVGLVLIVINRVAGLVLPYSSRFVIDQVVHQHHLALLRTIVLAVLCATAIQAGTSYALTQLLSKAAQRLISEMRMRVQSHIGRLSVQFHDANKTGALVSRIMSDVEGVRNLLGTGLVEFFGGVLTAIIALVVLLKTSAVMTSIAFGFLVVFGFVLSRAFRTIRPIMRERGKINAEVTGRLAESLGGVRVVKGYHAEAREESVFSKGVKRLLDNVISTLTATSVMSFSAAVLLGVVGSIVLYFGTREMIAGTMTEGDFVRYILFLGFLVAPVIQVVAIGTQLTEAIAGLDRTMEILRERPEDEDPRRTATLGEIKGTVEFEGVHFSYDGKTEVLHDVSFRSERGMVTALVGSSGSGKSTTIGLISAFYVPTSGRVLVDGIDLSTVRLDSYRIKLGVVLQESFLFDGTIRENVSFSRPQATEEEIMSACHIARVDEFAEKFEEKYDTIVGERGVKLSGGQRQRISIARAILAQPSILILDEATSSLDSESEALIQHGLSYLMQGRTTFVIAHRLSTIRRADQILVMEHGEIVERGTHEQLYALRGRYYELYTKQHGLESNLFLAPGEGDTIPDPIDAGPAVSSRNN

SEQ ID NO: 36277 - protein, 571 aa, Acidobacteria bacterium Ellin345
MKKTMTGAQIIWECLEREGTKIAFGYPGGAILPTYDALKHSSIHHVLVRHEQGATHMADGYARVSGGVGVAIATSGPGATNMVTGIATAMLDSSPIVCITGQVGSKLIGTDAFQETDITGVTLPITKHNYLVTKASEIAQTIREAFYIAKSGRPGPVLIDVTKDAQQGTCEFDWESAAPQLPGYRPDLSPDAAHYKQALELIKTAKRPVIFAGHGIMISGAMREVRDFAEKAGVPVALTLLGIGAFPASHPLNLGMMGMHGEAWVNQAIQDADLLIALGMRFDDRVTGNLKNYATKAKKIHVEIDPSEINKNVKVDVALVGDVREVLNELLPHVEATDRKEWFDHIESLKGDSAVRDIQNLPDNGHLYAAHVINDIWRETEGNAIVVTDVGQHQMWEAQYYKHDNPRSLITSGGLGTMGFALPAAIGAKMANPDAEVWVIVGDGGFQMTMCELATIVQERLDINIAIINNGYLGMVRQWQEFFYERNYQATPLLSPDFSVLASAYGIKSSSVTTRADVVPTVRAARKHQGAVLIDFQVEQEDTVYPMVPAGADLHNMIRRPSPIVETAMDK

SEQ ID NO: 36278 - protein, 446 aa, Acidobacteria bacterium Ellin345
MSQTAAKTAMKRASLLPFVFVMYSYTTGGPFGLEGQVTTSGPGMTLIYHLLLPFFWCIPVSFVSAELTTAMPVEGGFYRWSRAAFGDFWGFLAGWWNWCASFILGGVYAVMFADYMQFYFPQLKAPLAHFAVALAMIIVITFVNIVGIDAVGKVATVFGVLILAPIAVMCVWGATKWQHNPFLPLIPPGATPKQVAGVGLALGLWLYSGFEQLSTVAEEVEDPQRTFPRALAWAVPMAMATYFLPTLFSLAAVGDWHAWKDGYFSTAAFAIGGHWLGFAVNLAALITAVSLLNGTVIASTRMPFAMAEDGYLPRFLAKTHARFKTPWLAIICSACVYAALSWKSLSALIIVYSWLRVATTWMTVIAAWRLRAKDPNMKRPFRIPWGIAGVAYCVIAPLIIGAIALSASENPIGGLLSLALGPLMYPVVKFFARRAARADQAAAAIS

SEQ ID NO: 36279 - protein, 399 aa, Acidobacteria bacterium Ellin345
MASFEDVVIVSAVRTPIAKFQGAFSDLTATDLGAIAVREAVKRAGITDLNAVNECIMGNVLQAGLGQNPARQAAIKGGLPPHVGAMTINKVCGSGLKSVALAAQAIQTENAQLVVAGGMESMTNAPYLLPTARKGFRMGNQTAVDSMINDGLWDVYNNYHMGQTGENVADKYKVTREQQDEYAANSHRKAIEAQKAGRFKDEIVPVQLPSKKKDAPAEFLDRDEGPREDSTAISLAKLKPAFKKDGSVTAGNASTINDGAAALVVTSASKAKALGLKPMVRILAQATSGLEPAWVMMAPVDAVRQIWAKTGWSANDVDLYELNEAFSVQSVALVQELGLDASRVNVNGGAVALGHPIGCSGARVLTTLIYEMIHRNAKRGIASLCLGGGNAVAMAVELV

SEQ ID NO: 36280 - protein, 503 aa, Acidobacteria bacterium Ellin345
MDLLATKPLDVLMSEASETGEHSLKRALGPVNLMMLGVGAIIGAGIFVLTGAAAAQFAGPAIVFSYILAGIACVFAGLCYAEFASLIPIAGSAYTYGYATLGEIFAWIIGWDLVLEYAFGAATVASGWSSTLVAFLQDYGVSLPPRICDVHGSIWVQYQGRWSPLATVQSVLDTAHIDYHTLPNVVCIFNLIAFLAILAVTTLLVIGIKESANFNTGVVFVKLFAVLVFIGVAGAFVIKNPTVAQANWHPFLAFGWAGVIRAAGVVFFAYIGFDAVSTAAQEAKNPQRDMPIGILGSLIICTVLYILVSGLLTGVVHYDRLNIGAPVSLAIRETGRKWGSYIVNAGALAGLSTVMLVMLLGQSRVFYSMAHDGLLWKWAGEIHPKLRTPWKSTIVVGICVAFFGATIPIGDLGTLVSIGTLLAFVIVCAGIMILRKRRPDLPRPFKTPLVPLVPILGILTSLLMMVFLPLVTWIRLVVWLLIGFIIYFTYGRKHSKVQAMQKK

SEQ ID NO: 36281 - protein, 522 aa, Acidobacteria bacterium Ellin345
MPDRSEAPDLSTQAQVRSTAAKDEGFIQGLGLTSATTLVMGSMIGSGVYIVAADITRLVQSPALLIGAWLVTGFMTITAALAYGELAAMMPKAGGQYVYLREALGPLTGFLYGWTLFMVIQTGTIAAVGVAFGKFLGIFFPSISSSHWIWHIAHVPPIHIGPMVLGNMDVGLNTQNLMGILTIIFLSVLNVYGVKLGALVQNVFTFAKTAALLGLVVLGITIGRTAEAMAANFHGHFFEGAGWTSVHPVQVGVGGPMALVITVTVLAVAQVGSLFSADAWNNVTFTAGEVKNPQRNLPLSLAIGTGAVILLYCLANFVYLLVLPMVGDPNGTTVLARGIQHATEDRVATAVMQQIFGAAGAAIMAVLILISTFGCNNGLILSGARVYYAMAKDGLFFKSAGKLHPEHKTPAASLFVQCIWCCILCVSGSYGQLLDYIVFAVLIFYILTIVALFVLRLKKPDVPRPYRAIGYPILPAIYILMALFIDIVLLLYKPQYTWPGLIIVLLGIPVYFIWSRVNRATA

SEQ ID NO: 36282 - protein, 485 aa, Acidobacteria bacterium Ellin345
MEAIISPTPKSAPSNTPQLARDLRVSHATAVVVGTIIGSGIFLVPAEMMRAVGTAKLVYLAWIVGGILSFLGALTYAELGAMKPQSGGEYVYVRDAYGPLMSFLYAWSWFVIAKPGSMATIATGMMQILGGYPALSFLPKNVVSGVPFTYAQLAAVALIIFISAVNYIGVKKAGQFQVVFTVLKLAIIFGVIVVGFFAGHGSWSNFTTSFTGATGGIAGFMIALVAALWAYDGWNDINMVAEEIDHPERNVPIALIVGVGIVAALYMLLNAAVQYALPAQAIAMSKRAASDAVLVSIGAGAASIFAALMAIQMLATINGTTLSGARIPYALARDGYFFEAIGKVHPRYLTPANAIVFQGALAVILVSLVGKFQQLFSLTIFAEWLFYMIATSTVFVFRRREPNANRPYKTWGYPVVPAVFIAAAAMLLCYTFVDNLKYAMIPTTLIGPPLNSISTGGALVILLGVPVFWWFARQKSLTTKGTKEL

SEQ ID NO: 36283 - protein, 324 aa, Acidobacteria bacterium Ellin345
MPFRSGFVSIIGRPNAGKSTLLNALVGEKIAIVTHKPQTTRNRIQGIVTVPKKGQIVLVDTPGVHKPDKTLNKRMMQEVYDALEGCDLLLYIHDVTHKFEKEDEYTLSLVKKTGQPVMLLLNKIDLIAKPKLLEIITQFSTLHDFKEIIPISAAKGSGLDILRKKVLQSLPVGPHYFPDDQITDQPERFLAAEIIREQVLVCAHQEVPYATTVMVEQWEEKRSLTKIAAAIFVERDGQKAIIIGRGGESLKRIGTNARRELEKILNTKVFLELFVKVQAGWRDSRHFVDQLDWHRQLEELSTSLIPDRDAINPKGHVPGGRRKH

SEQ ID NO: 36284 - protein, 243 aa, Acidobacteria bacterium Ellin345
MWRVGTVVALRDETQTAKTITLRVVDWPNHVAGQHVDVRLTATDGYSAVRSYSIASAPNAEGRVELTVEQLPEGEVSPYLTQELAIGDHIELRGPIGGWFIWRPRQTEPIQLIAGGSGIVPLMAMIRSRASTGSTVPFRLLYSVREPGAVYYRNELQAISSRDDWLTTTHAYTRAAPKDWLRPPGRVDTSLIANVTWPSSQTPTCYVCGPTAFVESIAAMLVSCGNHPDKIKTERFGPTGGLK

SEQ ID NO: 36285 - protein, 626 aa, Acidobacteria bacterium Ellin345
MRQLKPLLHYLKPYWFQVGVSVILLAFVGLLQAFRLLLIGPVFQRVLHPSISNEEIALFKLPGTHYVFHLQKVVPDALHNDWTVVAFALVVSTLLKGICDYAGTYLVNYGGFGMVTDLRNDVYDAVLRRSAAFFSKNATGKLISTIINDIERVQFAMSSVLAEMMQQFFTFFFTAAVVVINGRKLSWILLIFLPIIIGSSRKVGRSVRTTTRKGQDRLAEIQNILHETITGVRIVKAFGMELWEILRFRSAAKRLFKANLRSVSAAAISSPLMDVLGAIAVALLLLVGRQQIKTGYMDLPQFMTFIVAVFSLYDPVRKFAGFYNNFQQAIGASSGIVEFMHAEDEVREKASARELKPFEKTIRFDHVSFAYGSDADCREILRDIDFAVKRGEVLAIVGSSGAGKTTLVHLLPRFFDVSSGVVTIDGQDIRDVTVASLRKQIGIVTQETILFNDTVRNNIAYGQPHVSQEQVEAAAKAALAHDFILNLPEGYNTIIGERGVRLSGGERQRLAIARAILKNAPILILDEATSALDAESESLVASALQNLMTGRTVFVIAHRLSTVRRADRILVLEKGVIADSGSHEDLMSHLGTYRKLYDLQFVDFDGSNGEANGHAVHVPLPDTRTT

SEQ ID NO: 36286 - protein, 191 aa, Acidobacteria bacterium Ellin345
MKRMQFGKRTCVFLDRDGVINKKLPEGQYITRPEQIELLPGVVEAIRTLNQAGCIALVVTNQRAIGLGLLSEMGLAEIHEHLRLELEARGARLDAIYYCPHDKNSCHCRKPEIGMIKRAFQDFPDASANNSILIGDSISDIEAGRRAGIPTIFIHGDPANQKPGAEKAIGLADAKAHSLLSAVNQFIFSNP

SEQ ID NO: 36287 - protein, 405 aa, Acidobacteria bacterium Ellin345
MREKIVLAYSGGLDTSIIIPWLKENYSCDVIAMVGDVGQGDDIDAVVAKAHKTGASKVIVKDLREEFLTQYVYPAISTGAVYEHKYLLGTSLARPPIAKAQVEVALAEGATAVSHGCTGKGNDQVRFEHAFQALAPELKIIAPWREWTLKSREDCLDYAEAHGISVAQSREKIHSRDRNLLHVSHEGGELEDPNNAPLDTTWTWTKSPQEAPDRVEEVTIGFEGGVPVSINGMKLEPLALIELLNEIGARNAIGRIDLVENRFVGIKSRGCYETPGGSLLLAAHRELEALCLDRDTLHYKQEVALKWAELVYFGLWFTPLRESLDAFVASTQKNIAGAVKLALYKGNIAVAGRTSPKSLYRPDIASFTMGAGYDQKDAEGFIRILGLPARSRALIENAGKEKVSK

SEQ ID NO: 36288 - protein, 67 aa, Acidobacteria bacterium Ellin345
MREKGTVKWFNGAKGYGFIQRSTGEDVFVHFSAIQENGYRTLNEGETVEFDLLKGPKGFQAANVVRA

SEQ ID NO: 36289 - protein, 387 aa, Acidobacteria bacterium Ellin345
MIVGVPRESYPGERRVALTPAVVPNLAKAGLEVVIQAGAGADAGYPDALYVEKGAKVLPDRASVFSSADTILQVLGDGANDITGAQDVPFYRRDQVLVGFLRPLGTKEVVQQIADAGVTSFAVELMPRITRAQSMDALSSMANIAGYKAVLMAADLVPRVFPMMTTAAGTITPARVLIIGVGVAGLQAIATARRLGAVVSAYDVRPAVKEQVQSLGAKFVELPLETSDAQDERGYAKAQDEAFYQKQRELLGKVVAESDVVITTAVVPGKKAPLLVPAGMVRGMQPGSVVVDLAAERGGNCELTKPAQNVVENGVTIVGQVNVASGVPFHASQMYAKNLLTFLQSQTKEGKFLYDMSDQVTTDTLLTRGGQIVNKRVREHFGLPPLA

SEQ ID NO: 36290 - protein, 66 aa, Acidobacteria bacterium Ellin345
MEQGTVKWFNDAKGYGFLTRQSGEDVFVHFSAIQSKGFRSLQEGQTVSFSVVKGPKGLQAENVQIV

SEQ ID NO: 36291 - protein, 541 aa, Acidobacteria bacterium Ellin345
MNHVPQHRSKLSLAQKFTRLATRLRDPEWRRYGATVAAGKAIGISVVMLAMVVITGLFFTTALASDTAVKAADIVNPINTVWTLIAAFLVFGMQVGFTMLEAGFCRSRETVNVLMECIVDTCLCGLLFYAFGFAFMFSHGNGFIGYHWFFLKDVPATYETTGVAFLAFWLFQFAFADTCSTITSGAMIGRTGFVGDLIYSVGVSGFIYPIVGHWAWGPDGFLATMGSSGYFLPSVGISFHDFAGSTVVHTIGGFIALAGSIVLGPRLGRKFKRDGGAPMLPHDLTIAASGGLLLWFGWYGFNPGSTLSAMDFEGIGRVATNTTLAACAAGLTAMAYGYFLSKKWDVGFTVNGFLAGLVAVTCPCYWVSPTGAIMLGGVAGVVVILGVEALEWLRIDDPIGAVPVHGLCGIWGTLSLGLFACGKYGSTGPLAPDNSAALKGLFYGGGFQLLTAQAIGSAIITFATFGVALALMYAVNATGTLRVSEEGELYGIDLHEHGIPAYPEYVISALASPSGAPPQHHAVEKHPVKLTEAVAGATAHK

SEQ ID NO: 36292 - protein, 66 aa, Acidobacteria bacterium Ellin345
MEQGTVKWFNDAKGYGFISRQNGEDVFVHFSAIESKGFRSLQEGQAVTFSVVKGPKGWQAEKVSAL

SEQ ID NO: 36293 - protein, 359 aa, Acidobacteria bacterium Ellin345
MDTAAKPSAVQPQNSSSAEVGTIVTGGERKVNPGPDPKNDRKPTRTPDPKFKIFSGAANEPLAQEICAFLGIPLGQTKLTKFSDGEIYVQILENVRGGDIFLVQPTCHPVDHHLMQLLLMIDALKRASARRITTVIPYFGYARQDRKDKPRVPVSAKLVADLLTTAGADRALVVDLHAPQIQGFFNIPVDHLFGSPVLVDYFKKLELPDLTVVSPDAGGVERARFFAKKMDSALAIVDKRRTDMNVTEVMHVIGDVHGRTCLILDDIIDTAGTLVKTAQALADAGASEVYACASHAVLSGEAINRISKSVLKELVVTNTIPLTDAGKAEPKIKVLSIAGLIARAIQSIHEETSVSKLFL

SEQ ID NO: 36294 - protein, 565 aa, Acidobacteria bacterium Ellin345
MSSNSQSQSLFSLPNWLTSYRSEWLRPDIIAGLTAAAVVIPKSMAYATIAGLPVQVGLYTAFLPMIIYAVLGTSRVLSVSTTTTIAILTAAEFAEVVPNGDAASLLRASATLTLLVGAMLVVACFLRLGFVANFISQPVLTGFKAGIGIVIVLDQVPKLLGVHIPRATFLKNVLATLRSIPETKLLTLGVSVTVIVLLVALEHFMPKSPAPLIGVAVGIAGAYFLHLSTHGVELVGRIPQGLPPVTLPALGMVEHLWPGALGIALMSFTETIAAGRAFAKSDEPWPQANRELMATGLANVGGALLGAMPGGGGTTQTAVNRLAGARTQVAELVTGAMTLVTMLLLAPMIALMPQATLAAVVIVYSVGLIKPAEFREILRVRRTEFLWAVIAMAGVVLVGTLKGILVAIIASLVALAYQVANPSVYVLGRKPGTNIFRPRSAEHPEDETYPGLLMVRPEGRIFFANAENLSHKVWVLIDEAKPNVVIVDMRAVFDLEYTALKMFTEGEKKQREYGMRLWLVGMNPHVFDMVQKSALGESLGREGMHLNLESAVAKYAEHASLPATV

SEQ ID NO: 36295 - protein, 215 aa, Hordeum vulgare subsp. vulgare
MPMACGLCGASNCPYHMMSPVLLHHHHHQEHRQREYQFFAQGHHHHHHGAAADYPPPQPPPANCHHRRSWATLCHETAAPVNSTRLTQEVDAGGQQMAHLLQPPVPPRATIVPFRGSAFTNTISNATIMTIDTEMMVGTAYSPTMQEREAKVMRYREKRKKRRYDKQIRYESRKAYAELRPRVNGRFVKVPEAAASPSPPATPHDPSELHLGWFR

SEQ ID NO: 36296 - protein, 215 aa, Hordeum vulgare subsp. vulgare
MSMACGLCGASNCPYHMMSPVLLHHHHHQEHRQREYQFFAQGHHHHHHGAAADYPPPQPPPANCHHRRSWATLFHETAAPVNSTRLTQEVDAGGQQMAHLLQPPAPPRATIVPFRGSAFTNTISNATIMTIDTEMMAGTAYSPTMQEREAKVMRYREKRKKRRYDKQIRYESRKAYAELRPRVNGRFVKVPEAAASPSPPASPHDPSELHLGWFR

SEQ ID NO: 36297 - protein, 215 aa, Hordeum vulgare subsp. spontaneum
MSMACGLCGASNCPYHMMSPVLLHHHHHQEHRQREYQFFAQGHHHHHHGAAADYPPPQPPPANCHHRRSWATLFHETAASVNSTRLTQEVDAGGQQMAHLLQPPAPPRATIVPFSGSAFTSTISNATIMTIDTEMMVGTAYSPTMQEREAKVMRYREKRKKRRYDKQIRYESRKAYAELRPRVNGRFVKVPEAAASPSPPASAHDPSELHLGWFR

SEQ ID NO: 36298 - protein, 216 aa, Hordeum vulgare subsp. vulgare
MSMSCGLCGASNCAYHMMSPVLLHHHHHQEHPLHEYQFFAQGHHHHHHHSTAADYPPPPPPPDNCHHHRSWTTPFHETAAPENSTRLTREVDAGGQHMAHLLQPPAPPRATIVPFCESAFTSTISNATIMTIDTEMMVGPAYNPTMQEREAKVMRYREKRKRRRYDKQIRYESRKAYAELRPRVNGRFAKVPEAVVSPSPPTSPHDPSKLHLGWFR

SEQ ID NO: 36299 - protein, 214 aa, Hordeum vulgare subsp. vulgare
MSMSCGLCGASNCAYHMMSPVLLHHHHHQEHPLHEYQFFAQGHHHHHSAAADYPPPPPPPDNCHHHRSWTTPFHETAAPENSTRLTREVDAGGQHMAHLLQPPAPPRATIVPFCESAFTSTISNATIMTIDTEMMVGPAYNPTMQEREAKVMRYREKRKRRRYDKQIRYESRKAYAELRPRVNGRFAKVPEAVVSPSPPTSPHDPSKLHLGWFR

SEQ ID NO: 36300 - protein, 215 aa, Hordeum vulgare subsp. vulgare
MSMSCGLCGASNCAYHMMSPVLLHHHHHQEHPLHEYQFFAQGHHHHHHSAAADYPPPPPPPDNFHHHRSWTTPFHETAAPENNTRLTREVDAGGQHMAHLLQPPAPPRATIVPFCESAFTSTISNATIMTIDTEMMVGPAYNPTMQEREAKVMRYREKRKRRRYDKQIRYESRKAYAELRPRVNGRFAKVPEAVVSPSPPTSPHDPSKLHLGWFR

SEQ ID NO: 36301 - protein, 229 aa, Nicotiana langsdorffii x Nicotiana sanderae
RGKIEIKRIENTTNRQVTFCKRRNGLLKKAYELSVPCDAEVALIVFSSRGRLYEYANNSVKATIERYKKACSDSSNTGSISEANAQYYQQEASKLRAQIGNLQNQNRNMLGESLAALSLRDLKNLEQKIEKGISKIRSKKNELLFAEIEYMQKREIDLHNNNQYLRAKIAETERAQQQQQQQMNLMPGSSSYELVPPPQQFDTRNYLQVNGLQTNNHYTRQDHPSLQLV

SEQ ID NO: 36302 - protein, 206 aa, Nicotiana langsdorffii x Nicotiana sanderae
MEFQSDLTREISPQRKLGRGKIEIKRIENTTNRQVTFCKRRNGLLKKAYELSVLCDAEVALIVFSSRGRLYEYANNSVKATIERYKKACSDSSNTGSISEANAQYYQQEASKLRAQIGNLQNQNRNMLGESLAALSLRDLKNLEQKIEKGISKIRSKKNELLFAEIEYMQKREIDLHNNNQYLRAKIAETERAQQQQQQQMNLMPG

SEQ ID NO: 36303 - protein, 216 aa, Nicotiana langsdorffii x Nicotiana sanderae
RQVTFAKRRNGLLKKAYELSVLCEAEVALIIFSTRGKLYEFSSTSNTLKTLERYQKCSYGTLEVKQSGRDTNEEKFYREYLKLKSKYESLQRYQRHLLGDELGPLNIDELEHLELQLDTSLKHIKSTREKLWIEANKGLERKLEEIYAENNLQQSWGGGGEQSGAYSQQHPQTQGFFQPLECNSTLQIGYDPASSSQITGVTSGQNINGIVPGWML

SEQ ID NO: 36304 - protein, 116 aa, Nicotiana langsdorffii x Nicotiana sanderae
MGRGRVELKKIENKINRQVTFAKRRNGLPKKAYELSVLCEAEVALIIFSTRGKLYEFSSTSNTLKTLERYQKCSYGTLEVKQSGRDTNEEKFYREYLKLKSKYESLQRYQRHLLGD

SEQ ID NO: 36305 - protein, 116 aa, Nicotiana langsdorffii x Nicotiana sanderae
MGRGRVELKKIENKINRQVTFAKRRNGLLKKAYELSVLCEAEVALIIFSTRGKLYEFSSTSNTLKTLERYQKCSYGTLEVKQSGRDTNEEKFYREYLKLKSKYESLQRYQRHLLGD

SEQ ID NO: 36306 - protein, 346 aa, Acholeplasma multilocale
MGNKTTNDINIFGLSASKELTTAVCDYLNIEQKNIKTVRFADGEILVEALDSVRGKEIYIVQSTCSPVNENLMELLIAIDAFKRGSAEKINVVIPYFGYARQDRKAKGRQPITARLVADLIEKAGADRVITVDIHSAQSMGFFDIPMDNFQTSQTLADEIVDTIIENKLDRKNCILVSPDHGGLTRVHKVAEYTSQMTNGIAVIAKRRPEPNKAEVEFVLGDIEGKTCFIVDDMIDTGGTIINAAKALKENGAKGVYIFACHGLFNGPAKQRMDEAIAEGIVEGVVVTDTIEIPAEKQFKGLKVISVKHLIGDMIKASVLHESLTEVYFNKKNAILSKVEEFVKNN

SEQ ID NO: 36307 - protein, 401 aa, Plasmid R100
MILDASYTLLVACIALLIGMFVVKFTPFLQKNHIPEAVVGGFIVAIVLLIIDKTSGYSFTFDASLQSLLMLTFFSSIGLSSDFSRLIKGGKPLVLLTIAVTILIAIQNTVGMSMAVMMNESPFIGLIAGSITLTGGHGNAGAWGPILADKYGVTGAVELAMACATLGLVLGGLVGGPVARHLLKKVSIPKTTEQERDTIVEAFEQPSVKRKINANNVIETISMLIICIVVGGYISALFKDTFLQLPTFVWCLFVGIIIRNTLTHVFKHEVFEPTVDVLGSVALSLFLAMALMSLKFGQLASMAGPVLIIIAVQTVVMVLFACFVTFKMMGKDYDAVVISAGHCGFGMGATPTAIANMQTVTKAFGPSHKAFLVVPMVGAFIVDISNSILIKIFIEIGTYFT

SEQ ID NO: 36308 - protein, 217 aa, Populus tomentosa
MVRGKTQMKRIENATSRQVTFSKRRNGLLKKAFELSILCDAEVALIVFSTRGKLYEFSSSSMNRTIERYQKRAKDVGISSRMVKDNMQPVKEDAFTLAKKIDILEVSKRKLLGDGLEQCSIDDLQQLENQLERSLTRIRARKNQLFREQIEKLKGEEKILMEENTKLREKCGMQPLDLQATKTPQILQDRQIIEVETELFIGPPDSRDTACPQNHKS

SEQ ID NO: 36309 - protein, 621 aa, Porphyra yezoensis
MGKVVGIDLGTTNSVIAVMEGGKPTVIPNAEGFRTTASVVAYTKSGDKLVGQIARRQAVINPENTFYSVKRFIGRKQNEISQEIRQTSYNVKTSGSSIKIACPALNKDFAPEEISAQVLRKLVEDASTYLGETVTQAVITVPAYFNDSQRQATKDAGKIAGLDVLRIINEPTAASLSYGLDKQNNETILVFDLGGGTFDVSVLEVGDGVFEVLSTSGDTHLGGDDFDQQIVEWLIKDFKQNEGIDLGKDRQALQRLTEAAEKAKIELSNLTQTEINLPFITATQDGPKHLEKTVTRGKFEELCSNLIDKCSIPVNNALKDAKLEASSIDEVVLVGGSTRIPAIQQMVKRLIGKDPNQSVNPDEVVAIGAAVQAGVLAGEVKDILLLDVTPLSLGVETLGGVMTKIIPRNTTIPTKKSEVFSTAVDNQPNVEIQVLQGERELTKDNKSLGTFRLDGIMPAPRGVPQIEVTFDIDANGILSVKAKEKATGKEQSITISGASTLPKDDVERMVKEAEENFDTDQKRRKNIDTKNQAESLCYQAEKQVKEFEDKISQDLKIKIEELITELRSSLEKEEYDNIESISQQLQNALMDIGKNAAQTESKDTKAKDDDTVIDTDFSEAK

SEQ ID NO: 36310 - protein, 333 aa, Solanum demissum
VYCWADSTFLCAGCDARMHSANLLASRHERVWVCEACGRAPAAFLCKADAASLCASCDADIHSANPLARRHHRVPIMPVLGTLYGPPAVETVGSGSMMIGGPTGESTEDYGFLSFTQNADDMTVDEEDEDEAASWLLLNPPVKKNNKNFDNDHNNQNNNYGMLFGREVVDDYLDLAEYGGVSQFNDQYSVNQQQQHYSVPQKSYRGDSVVPVQEGQGKSLILYHQQQQQQQSHHLNFQLGMEYDNYNTRYGYPATMSHSVSISSMDVSVVPESALSETSNSHPRPPKGNIGLFSGPPIQIPPQLTPMNREARVLRYREKKKNRKFEKTIRYAS

SEQ ID NO: 36311 - protein, 638 aa, Pseudoalteromonas sp. SM9913
MGRIIGIDLGTTNSCVAVLDGDKARVIENAEGDRTTPSIIAYTQDGETLVGQPAKRQAVTNPTNTLFAIKRLIGRRFEDEEVQRDIGIMPFKIIKADNGDAWVEAGGEKRAAPQISAEVLKKMKKTAEDFLGEEVTEAVITVPAYFNDSQRQATKDAGRIAGLEVKRIINEPTAAALAYGMDKNRGENVVAVYDLGGGTFDLSIIEIDEVEGEHTFEVLATNGDTHLGGEDFDNRVINYLVAEFKKDQGIDLQNDPLAMQRVKEAAEKAKIELSSAQSTEVNLPYVTADASGPKHMNVKLTRAKLESLVEDLVTKSIEPLKRALADADLSVNDINDIILVGGQTRMPLVQRTVAEFFGKEPRKDVNPDEAVAVGAAIQGGVLAGDVKDVLLLDVSPLSLGIETMGSVMTALIEKNTTIPTKKSQTFSTAEDNQSAVTIHVLQGERKRSSDNKSLGQFNLEGIRPAQRGTPQIEVTFDVDADGILHVSAKDKDTGKEQKITIQASSGLSDEEVEKMVRDAEAHAEDDKKFEELVAARNQADALVHGTRKQIEEAGDALPSEDKDAIEAAVVDLEAAIKSDDKAEIEAKTQALAEKSQKLMEIAQAKAQQAGGDAGEQQQSAKQDDDVVDAEFEEVKDDK

SEQ ID NO: 36312 - protein, 590 aa, Nicotiana plumbaginifolia
MALPETQQDTKTLPDAWDYKGRPAVRSSSGGWSSAAMILGIEAVERLTTLGIAVNLVTYLTGTMHLGNASSANNVTNFLGTSFMLTLLGGFVADTFLGRYLTIGIFTTIQAMGVTILTISTIIPSLRPPKCSPGSSTCIPASSKQLMVLYIALYMTALGTGGLKSSVSGFGSDQFDETDKKERGQMIKFFNWFFFFINVGSLGAVTVLVYIQDNLGREYGYGICACAIVIGLVIFLSGTRKYRFKKLVGSPLTQIASVFVAAWNKRHMDLPSDSTLLYNIDDIPGDGNKKAKQRLPHSKEFRFLDKAAIKVQDTESAGITVVNKWNLSTLTDVEEVKLVVRMLPTWATTIMFWTVYAQMTTFSVSQATTMDRHIGNFEIPPASLTLFFVGSILLTCIFYDRAVVPVCRRVLNNPHGTTPLQRIAVGLILSIIAMVAAALTEVKRLNVAHLHGLTNDANAKVPLSVFWLVPQFLLVGAGEAFTYIGQLDFFLRECPKGMKTMSTGLFLSTLSLGFFVSSILVTIVHKVTVKNPWLADNLNQGRLYDFYWLLATLSVLNLMVFLFISRRYVYKEKRLAECGIEMEDSEPACH

SEQ ID NO: 36313 - protein, 594 aa, Nicotiana plumbaginifolia
MALPETQQDSKALPDAWDYKGRPALRSSSGGWASGAMILGVEAVERLTTLGIAVNLVTYLTGTMHLGNATAANNVTNFLGTSFMLTLLGGFVADTFLGRYLTIGIFATVQAMGVTILTISTIIPSLRPPKCEQVGSSSCIPANSKQLMVLYIALYMTALGTGGLKSSVSGFGTDQFDDGDKKEKGQMIKFFDWFFFFINVGSLGAVTVLVYIQDNLGREWGYGICACAIVIGLVVFLSGTRKYRFKKLVGSPLTQIASVIVAAWKKTHLELPSNSSLLFEIDNIFGEGNKKSKQKLPHSKEYRFLDKAAIKEDNDLESNGTKVVINKWKLATLTDVEEVKLLIRMLPTWATTIMFWTVYAQMTTFSVSKATTMDRHIGTFEIPPASLTVFFVGSILLTVIFYDRIIVPICRRFMNKPHGLTPLHRIFTGLVLSILAMIAAALTEVKRLKVAHLHGLTNDANATIPLTVFWLVPQFLLVGAGEAFTYIGQLDFFLRECPKGMKTMSTGLFLSTLALGFFVSSILVTIVHVVTGTKNPWLADNLNQGRLYDFYWLLAILSVFNLMFFLYSSRKYVYKEKRLAEMGIELEDDGPVCH

SEQ ID NO: 36314 - protein, 457 aa, Prunus persica
KTDEYGNPVHHTTTGTGRTDEFGNPVQHGVADTGYGTGAGYGIHTKPGVVEHHGVPAVLHSKDDQYSRDTQTTTGGYGGDGYTGGEHQEKKGLLGQLQDKLPGGNKDGQYSHDTQTTTGAYGGAGYTGGEHHEKKGVIGQVKDKLPGGQKDDQYCRDTHPTTGAYGGAGYTGGEDHEKKGIIGQVKDKLPGGQKDDQYCRDTHPTTGAYGGAGYTGGEHQEKKGIIGQVKDKLPGGQKDDQYCHDTHPTTGAYGGAGYTGGDTREKKGIIGQVKDKLPGGQKDDHYSHDTHPTTGAYGGAGYTGDDTREKKGIIDQVKDKLPGGQKDDHYSHETHPTTGAYGGAGYTGDDTREKKGVVEKVKEKLPGGQNVHPTTGPYGGGGAAGIGETRERKGVGEKVKEKLPGGHKDDQYLHDTHPTKPTSAAHGGVGHTGGEPQLHEKKGLIEKIKDKLPGHNN

SEQ ID NO: 36315 - protein, 219 aa, Triticum aestivum
MRRIEDATSRQVTFSKRRSGLLKKAFELGVLCDAEVALIVFSPRGRLYEYASAPDLQKTIDRYLNHTKGTSANEKTVEQPAAGVQMCRSEATALKHKIDAIEAYQRKLSGEGLGSCSAHELQELELQLEKSLSCIRQKKQQKMVAKISELKEKERKLLTENSVLREEYKALPLLELATAAAAERSPDGAGVEEAEEDEWRRHYMEVETELVIGRPGSSS

SEQ ID NO: 36316 - protein, 259 aa, Triticum aestivum
MAPSSPAAAAVAEGDEQQQQQIVAAAAAAKKGGGKRGRREMRRIEDATSRQVTFSKRRSGLLKKAFELGVLCDAEVALIVFSPRGRLYEYASAPDLQKTIDRYLNHTKGTSANEKTVEQPAAGVQMCRSEATALKHKIDAIEAYQRKLSGEGLGSCSAHELQELELQLEKSLSCIRQKKQQKMLDKILELKEKERKLLTENVVLREEYKALPLLELATAAAAERSPDGAGAEEAEEDERRLHYMEVETELVIGRPGSSS

SEQ ID NO: 36317 - protein, 222 aa, Triticum aestivum
MVRGKTQMKRIENPTSRQVTFSKRRGGLLKKAFELSVLCDAEVALVVFSPRGRLYEFTSSSMKNTIERYKTVTKDNMSRQTVQQDMEKIKADAEGLSKKLDALEACKSKLLGQNLEECSIEELQSLEVKIEKSLLGIRAMKTRRFEEQLSTLRQKEMTLRQHNEELYSQCQKEQHLASEAAAPPAPATLAALPAPVTLEEQGQQMVDVETGLFLGLPGTGRP

SEQ ID NO: 36318 - protein, 222 aa, Triticum aestivum
MVRGKTQMKRIENPTSRQVTFSKRRGGLLKKAFELSVLCDAEVALVVFSPRGRLYEFASSSMKNTIERYKTVTKDNMSRQTVQQDMEEIKADAEGLSKKLDALEACKSKLLGQNLEECSIEELQSLEVKIEKNLLGIRAMKTRRFEEQLSTLRQKETKLRQDNEELYSQCQKEQHLAPEAAAPPAPATLAALPAPVTLEEQGQQMVDVETDLFLGLPGTGRS

SEQ ID NO: 36319 - protein, 977 aa, Phaseolus lunatus
MATRRTPTLAKSLFATVTASRTSRSRSARRLFSAITRASETSPNVLSRSQVVDALAANNVASAKFLSLSFTRSFHATNPSLRSAASSQVAQTEFTDMAWEGILGAVDAARISKQQIVESEHLMKALLEQKDGLARRVFTKTGLDNTSVLQATDDFIPKQPKVTGDTTGPVIGSHLSSLLDNARKYKKEMGDEYVSVEHLLLAFHSDKTFGQQLFKNLQLSGITLKDAVQAVRGSQRVTDQNPEGKYEALDKYGNDLTELAKRGKLDPVIGRDDEIRRCIQILSRRTKNNPVIIGEPGVGKTAIAEGLAQRIVRGDVPEPLMNRKLISLDMGSLLAGAKYRGDFEERLKAVLKEVTASNGQIILFIDEIHTVVGAGATSGAMDAGNLLKPMLGRGELRCIGATTLNEYRKYIEKDPALERRFQQVFCSQPSVEDTISILRGLRERYELHHGVKISDSALVSAAVLADRYITERFLPDKAIDLVDEAAAKLKMEITSKPTELDEIDRAILKLEMEKLSLKNDTDKASKERLSKLENDLSLLKQKQKELAEQWDNEKVFMTRIRSIKEEIDRVNLEMEAAERDYDLNRAAELKYGTLMSLQRQLEEAEKNLTDFRKSGKSLLRRRGHYLDITEIVSKWTGIPLSNLQQTEREKLVLLEQVLHNRVVGQDIAVKSVADAIRRSRAGLSDPNRPIASFMFMGPTGVGKTELAKALAGYLFNTENALVRIDMSEYMEKHAVSRLVGAPPGYIGYEEGGQLTEVVRRRPYSVVLFDEIEKAHHDVFNILLQLLDDGRITDSQGRTVSFTNCVVIMTSNIGSHFILETLRSTQDDKTGVYDQMKRQVVELARQTFRPEFMNRIDEYIVFQPLDSEQISKIVELQMERVKNRLKQKKIDLHFTEEAVKHLGVLGFDPNFGARPVKRVIQQLVENEIAMGVLRGDFKEEDSIIVDADVAPSGKERSLNRLLIKKLDSPVADAMVVNH

SEQ ID NO: 36320 - protein, 188 aa, Dianthus caryophyllus
SATPQTSEAACADDPNFMDPMPEDSSSSRLSSSGTAESTSHRFWVNGCLSYFDKIPDGFYSIYGMDPYVWTMCADLQESGRIPSIETLKSVDPATESSLEVVLIDRRSDATLKELQNRALEISSMCITSEDVVDQLAKLVCNRLKGAASTREEDLVPIWQDFSVGLRDCLDSIVLPIGSLSVGLCRHR

SEQ ID NO: 36321 - protein, 581 aa, uncultured marine group II euryarchaeote 37F11
MMKQRVHEAMMTGQFMSWSPDAETQNLIWHLSLQNAFEYDGKGAAGSVIGRIMSTRADLRQHGGQIGPLVAQSVAKANTLAQENGMDHVESLLQREAPHLLEGRQKQERREGLPPLKNTEGKEIVLRFAPNPNGPLSFGHARGVVINGTYAHEHKGTLILRFDDTDTTVKPPMLDAYDIIPKEVEWLLGRPADRIVLASDRIPLYYDHAERMLKEGFGYICQCPAEDFRTFRETKENCPCRDKSVEMNAEGWRMMLDGSYNPGDAVVRVKTDMGLKNPALRDWPALRIQDTQKNPHPRPQIGSTYRVWPLLDFQSAVEDQLQGVTHIVRGKDLMDSTRKQTLLYEHFGWEYPETIYWGRVKVHEWGGFSTSKMRASIESGAYTGWDDPRLPTLQGLQLRGIQAEALRNFWIELGVTQKDISVPLATLFSHNTKRIDDDAPRLSFVRNPVEIDLHGDIPDHIEIPVHPNHESMGMRIISMSSNQILIEKEDEKHPTYRLKEFADIEIGGQVGSISRSDRRPIIHWVSTDSSKEATLTLPLQDNIEHIQGLVEDHEYPVGTIIQLERIGYAIIREDDFLLMHE

SEQ ID NO: 36322 - protein, 626 aa, Bifidobacterium breve
MARVVGIDLGTTNSCIATLEGGEPTVIVNAEGMRTTPSVVAFSKSGEILVGEVAKRQAVTNVDRTISSVKRHMGTDWTVDIDGKKWTPQEISAQILMKLKRDAEAYLGEPVTDAVITCPAYFNDAQRQATKDAGKIAGLNVLRIINEPTAAALAYGLEKGKEDERILVFDLGGGTFDVSLLEIGKDDDGFSTIQVQATNGDNHLGGDDWDQKVIDWLVGEVKNKYGVDLSKDKIALQRLKEAAEQAKKELSSSTSTSISMQYLAMTPDGTPVHLDETLTRAHFEEMTSDLLGRCRTPFNNVLHDAGISVSDIDHVVLVGGSTRMPAVKDLVKELTGGKEANQSVNPDEVVAVGAAVQSGVIKGDRKDVLLIDVTPLSLGIETKGGIMTKLIDRNTAIPTKRSEVFSTAEDNQPSVLIQVYQGEREFARDNKPLGTFELTGIAPAPRGVPQIEVTFDIDANGIVHVSAKDKGTGKEQSMTITGGSGLPKDEIDRMVKEAEAHEAEDKQRKEDAETRNQAEAFAYSTEKLVNDNKDKLSDDIVKEVTDKVNALKEALKGDDTDKVKTAQGELMTSAQKIGQVLYAQQGAEGAAAGAGAAGASAGSASGSDDDTVEAEVVDDDDDKDNK

SEQ ID NO: 36323 - protein, 623 aa, Bifidobacterium bifidum
MARAVGIDLGTTNSCIATLEGGEPTVIVNAEGARTTPSVVAFSKSGEILVGEVAKRQAVTNVDRTISSVKRHMGTDWTVEIDGKKWTPQEISAQILMKLKRDAEAYLGEPVTDAVITCPAYFNDAQRQATKDAGKIAGLNVLRIINEPTAAALAYGLEKGKEDERILVFDLGGGTFDVSLLEIGKDDDGFSTIQVKATNGDNHLGGDDWDQKVIDWLVGEVKNKYGVDLSKDKIALQRLKEAAEQAKKELSSSTSTSINMQYLAMTPDGTPVHLDETLTRAHFEEMTSDLLGRCRTPFNNVLRDANISVSDIDHVVLVGGSTRMPAVKELVKELTGGKEANQSVNPDEVVAVGAAVQSGVIKGDRKDVLLIDVTPLSLGIETKGGIMTKLIDRNTAIPTKRSEVFSTAEDNQPSVLIQVYQGEREFARDNKPLGTFELTGIAPAPRGIPQIEVTFDIDANGIVHVSAKDKGTGKEQSMTITGGSGLPKDEIDRMVKEAEAHEAEDKKRKEDAETRNQAEAFAYQTEKLVNDNKDKISDEIAKEVTDKVNALKEALKGEDIEKIKSAQSELMTSAQKIGEALYAQQGAAGAADAAGAAAGASGAASNGGDDDVGAELLAHDDKK

SEQ ID NO: 36324 - protein, 579 aa, Populus tremula x Populus tremuloides
MAQDKHPLTGISDSGNHISILKKNKRLLLASFAALFLVATIAAVVAGVNSHKNGENEGAHAVLKSACSSTLYPELCYSAIATVPGVTGNLASLKDVIELSINLTTKTVQQNYFTVEKLIAKTKLTKREKTALHDCLETIDETLDELHEAQVDISGYPNKKSLKEQADNLITLLSSAITNQETCLDGFSHDGADKKVRKALLKGQTHVEKMCSNALAMIKNMTDTDIANELQNTNRKLKEEKEGNERVWPEWMSVADRRLLQSSSVTPNVVVAADGSGDYKTVSEAVAAAPKKSSKRYIIQIKAGVYRENVEVPKDKHNIMFLGDGRKTTIITASRNVVDGSTTFKSATVAAVGQGFLARGVTFENTAGPSKHQAVALRVGSDLSAFYECDMLAYQDTLYVHSNRQFFINCFVAGTVDFIFGNAAAVFQDCDYHARRPDSGQKNMVTAQGRTDPNQNTGIVIQKSRIGATSDLLPVQSSFPTYLGRPWKEYSRTVIMQSSITDVIQPAGWHEWSGSFALSTLFYAEYQNSGAGAGTSSRVKWEGYKVITSATEAQAFAPGNFIAGSSWLGSTSFPFSLGL

SEQ ID NO: 36325 - protein, 1111 aa, Arabidopsis thaliana
MLQQSSTHLLCGVVLLQLFAAQVDAQRSTSPWQTLSGDAPLVIARGGFSGLFPDSSLAAYQFAMVVSVADVVLWCDVQLTKDGHGICFPDLNLANASNSEEVYPNRQKSYPVNGVTTKGWFPIDFSLTELQKVLFSLIRGILSRSGKFDENGYSISTVQNVATQMKPALFWLNVQHDEFYEQHNLSMSSFLLSTSRTVSIDFISSPEVNFFRKIAGGFGNNGPSFVFQFMGKEDFEPTTNRTYGSILSNLSFVKTFASGILVPKSYILPLDDKQYLLPHTSLVQDAHKAGLKLYASGFANDVDIAYNYSWDPVSEYLSFVDNGNFSVDGMLSDFPLTASASVDCFSHIGRNATKQEQKHYHLPMVRASVDFLVISKNGASGEYPGCTKLAYEKAIKDGSDVIDCPVQMSSDGIPFCSSSIDLVNSTTVGQTHLRNRSIIVPEISSVAGIFTFSLTWHEIQSLTPAISNPFRENGMSRNPNERNSGNLISLYEFLNLAKNSTSLSGILISLENVVYLREKKGLDVVKVVLNRLTETGYIVGTLKVMIQSTTRLVLVDFKNQSTYKTVYKIKETIGNITDSAIEDIKKFANAVVINKASVFPNSDSFLTGQTTNVLERLQKFQLPVYVELFQNEFVSQPFDFFADETVEINAYIFGAGINGTITEFPYTAARYKRNRCLGREEVPPYMLPVNPGGVLTLISTSSLPPAQDPNPIFTHDDVTEPPLPPVIAKSPTSTLGTPSTIAKPLISWSVAGVVLFLVLLTLVFCFHRKRETRLRQQKLKALIPLEHYTYAQVKRITKSFAEVVGRGGFGIVYKGTLSDGRVVAVKVLKDTKGNGEDFINEVATMSRTSHLNIVSLLGFCSEGSKRAIIYEFLENGSLDKFILGKTSVNMDWTALYRIALGVAHGLEYLHHSCKTRIVHFDIKPQNVLLDDSFCPKVSDFGLAKLCEKKESILSMLDTRGTIGYIAPEMISRVYGNVSHKSDVYSYGMLVLEIIGARNKEKANQACASNTSSMYFPEWVYRDLESCKSGRHIEDGINSEEDELAKKMTLVGLWCIQPSPVDRPAMNRVVEMMEGSLEALEVPPRPVLQQIPISNLHESSILSEDVSVYTEG

SEQ ID NO: 36326 - protein, 860 aa, Arabidopsis thaliana
MWKLTRRLQPHINSTRWLVRNFRNGGAGDATGLYGFDHLKTAKGFQRFVADAIERSGELVSYISGMPSSPEIIKAMDEISDTVCCVVDSAELCRQTHPDREFVEEANKAAIEMNDYLHHLNTNHTLYAAVKKAEQDSNLLTKEASRTAHHLRMDFERGGIHLDPEKLDKVNNLTTNIFQLCREFSENIADDPGHVDIFPGSRIPRHLHHLLNPTYRSTSGGSRGSTRSAHKSKQKGFRINTDPRTVSSILQWTSDEEVRKMVYIQGNSVPHANHGVLEKLIAARHELSQMMGCNSYADIMVEPNLAKSPKVVTSFLQELSKTVKPKADEEFIAIRDFKREKCGNPSAELEPWDETYYTSMMKSSINDVDTAVVASYFPLPQCIEGLKVLVESLFGATFHTIPLAPGESWHPNVVKLSLHHPDEGDLGYLYLDLYSRKGKYPGCASFAIRGGRKISETEYQLPVIALVCNFSRACDSSIVKLNHSEVEVLFHEFGHALHSLLSRTDYQHFSGTRVALDLAEMPSNLFEYYAWDYRLLKRFARHYSTGETIPEKLVNSLQGARNMFAATEMQRQVFYALIDQMLFGEQPETARDVSHLVAELKRQHTSWNHVEGTHWYIRFSHLLNYGAGYYSYLYAKCFASTIWQSICEEDPLSLNTGTLLREKFFKHGGAKDPAELLTDLAGKEIISVHGEGIVPATTNPRFAIKCQNSQIESDTTEDPSRSKNSSSSGVGFGSPASSSSPAKKLSAATSGNKKGKGKREVNRRAPVEKPVFMSEEGAAKAEEQRQNENAFLLTWLGLGIVILIEGIILAASGFLPEELDKLFVKYVYPVFTPSVVLFVAGTTAYGVLKYIQNEKMKGQE

SEQ ID NO: 36327 - protein, 111 aa, Arabidopsis thaliana
MEVVVNKAKEIVSAYPVVVFSKTYCGYCQRVKQLLTQLGATFKVLELDEMSDGGEIQSALSEWTGQTTVPNVFIKGNHIGGCDRVMETNKQGKLVPLLTEAGAIADNSSQL

SEQ ID NO: 36328 - protein, 912 aa, Arabidopsis thaliana
MESKFSQFHGRKDILPCCQRLGLFLGFIYLYAVFLSNSGIGAFAIIGCVQAQDQQEFISLDCGLPMTEPSSYTESVTGLRFSSDAEFIQTGESGKIQASMENDYLKPYTRLRYFPEERRNCYSLSVDKNRKYLIRARFIYGNYDGRNSNPIFELHLGPNLWATIDLQKFVNGTMEEILHTPTSNSLNVCLVKTGTTTPLISALELRPLGNNSYLTDGSLNLFVRIYLNKTDGFLRYPDDIYDRRWHNYFMVDDWTQIFTTLEVTNDNNYEPPKKALAAAATPSNASAPLTISWPPDNPGDQYYLYSHFSEIQDLQTNDTREFDILWDGAVVEEGFIPPKLGVTTIHNLSPVTCKGENCIYQLIKTSRSTLPSLLNALEIYTVIQFPRSETNENDVVAVKNIEAAYKLSRIRWQGDPCVPQKYAWDGLNCSNNTDVSKPPRVLSLNLSSSGLTGIIAAAIQNLTHLEKLDLSNNTLTGVVPEFLAQMKSLVIINLSGNNLSGPLPQGLRREGLELLVQGNPRLCLSGSCTEKNSKKKFPVVIVASVASVAIIVAVLVIIFVLSKKKSSTVGALQPPLSMPMVHDNSPEPSIETKKRRFTYSEVIKMTNNFQRVVGEGGFGVVCHGTINGSEQVAVKVLSQSSSQGYKHFKAEVDLLLRVHHTNLVSLVGYCDERDHLALIYEFLPKGDLRQHLSGKSGGSFINWGNRLRIALEAALGLEYLHSGCTPPIVHRDIKTTNILLDEQLKAKLADFGLSRSFPIGGETHISTVVAGTPGYLDPEYYQTTRLGEKSDVYSFGIVLLEIITNQPVIDQSRSKSHISQWVGFELTRGDITKIMDPNLNGDYESRSVWRVLELAMSCANPSSVNRPNMSQVANELKECLVSENLRENMNMDSQNSLKVSMSFDTELFPRAR

SEQ ID NO: 36329 - protein, 887 aa, Arabidopsis thaliana
MERSLELLLLLIRTLAIIHISQAQSQQGFISLDCGLPANEPSPYTEPRTGLQFSSDAAFIQSGKIGRIQANLEADFLKPSTTMRYFPDGKRNCYNLNVEKGRNHLIRARFVYGNYDGRDTGPKFDLYLGPNPWATIDLAKQVNGTRPEIMHIPTSNKLQVCLVKTGETTPLISVLEVRPMGSGTYLTKSGSLKLYYREYFSKSDSSLRYPDDIYDRQWTSFFDTEWTQINTTSDVGNSNDYKPPKVALTTAAIPTNASAPLTNEWSSVNPDEQYYVYAHFSEIQELQANETREFNMLLNGKLFFGPVVPPKLAISTILSVSPNTCEGGECNLQLIRTNRSTLPPLLNAYEVYKVIQFPQLETNETDVSAVKNIQATYELSRINWQSDPCVPQQFMWDGLNCSITDITTPPRITTLNLSSSGLTGTITAAIQNLTTLEKLDLSNNNLTGEVPEFLSNMKSLLVINLSGNDLNGTIPQSLQRKGLELLYQGNPRLISPGSTETKSGKSFPVTIVASVGSAAILIVVLVLVLFLRKKKPSAVEVVLPRPSRPTMNVPYANSPEPSIEMKKRKFTYSEVTKMTNNFGRVVGEGGFGVVCHGTVNGSEQVAVKLLSQSSTQGYKEFKAEVDLLLRVHHTNLVSLVGYCDEGDHLALIYEFVPNGDLRQHLSGKGGKPIVNWGTRLRIAAEAALGLEYLHIGCTPPMVHRDVKTTNILLDEHYKAKLADFGLSRSFPVGGESHVSTVIAGTPGYLDPEYYHTSRLSEKSDVYSFGIVLLEMITNQAVIDRNRRKSHITQWVGSELNGGDIAKIMDLKLNGDYDSRSAWRALELAMSCADPTSARRPTMSHVVIELKECLVSENSRRNMSRGMDTLSSPEVSMIFDAEMIPRAR

SEQ ID NO: 36330 - protein, 303 aa, Arabidopsis thaliana
MNLWVSIFLVSAIAGSCLPSGFAYVDVCNHEFEVFRSVIEQKCPRSLYPSPPIEVDGDLLDKLMDANHGNAYISILFYTSRCPFSRAVRPKFDVLSSMFPHITHLIVEQSQALPSVFSRYGIHSLPSILMVNQTMKMRYHGPKDLASLIQFYKETTGESMLHEKPDCVSVCLKPVQYMDEGEPTSLDTDGNLITWLHNGSSIREIAEREPYMVLALMFLSLKLAILIFPIMGSRLKTLWALYVPHLSLGILGETSQLFGRALHMIDVRRLWIKLRLTKTRNFQERAKNALASVSLGKSSSQSA

SEQ ID NO: 36331 - protein, 306 aa, Arabidopsis thaliana
MELSLALTSTDHNPSPSEAHPDTMDFLSREWCNFAVQSLHPDPILYDRSIVPVETSIAKFQGDSSPVSCAMMDTSMKMDDPDFKPSMPSWKTNDVKSWIWMQQAMHPELSYEGFFRKKLVKPFWPFRLVLIYQINNIGFLNQNNNGFVETSMENYAVDKEMVERDKGETKGRKNAGKDGGNGRPSTRETAVASAAAVVAAQCAQMAETMGANRDQLSTMIGSAMTGTSVSEILTLTASATTSLRGAATLKARRGCKINRLNGSAPVLPIEDSSYLPPEFDKNTSVLAKGTDLFVETPDERLKRSLD

SEQ ID NO: 36332 - protein, 225 aa, Arabidopsis thaliana
MPLGAATVVEEEEEEEEAVPSMSVSPPDSVTSSFQLDFGIKSYGYERRSNKRDIDDEVERSASRASNEDNDDENGSTRKKLRLSKDQSAFLEDSFKEHSTLNPKQKIALAKQLNLRPRQVEVWFQNRRARTKLKQTEVDCEYLKRCCESLTEENRRLQKEVKELRTLKTSTPFYMQLPATTLTMCPSCERVATSAAQPSTSAAHNLCLSTSSLIPVKPRPAKQVS

SEQ ID NO: 36333 - protein, 368 aa, Arabidopsis thaliana
MVKKGGTKRKIAIETIQKRDSLRVTCTKRREGLYSKASQLCLLSDAQIAILATPPSSESNVSFYSFGHSSVDAVVSAFLSGQRPVPKDNKETREDVGICLTRNNLGLGFWWNDESLARSENPQEISEAIDSMRTLLRNLKELRADEALACNQAFVNDREDLKNNDKCDFVSDHETHDQTLILQSASPICCIPENLNEITQEPNQTLNIQSSTSAICCVPDNSPENFNEITEEQDQIRSICETFCVMDNNAALPEMNLDYDQDIGFDTPFESALNDWFSDNTTHQEISAISSPNSCDENMTKATKPLEPQKDEKQLVPEEALIVLAGPLTRSKSKKFNQAINGLLKELKKNQEDVTQSSFIVITAQEAR

SEQ ID NO: 36334 - protein, 462 aa, Nicotiana sylvestris
MVASPDNNAADGRTVKNKRPIDEWLPITSSRNGQNGGYSAFHNVTAMVGAGVLGLPYAMSELGWGPGVTVMVVSWVITLYTLWQMVECKKCPGMLAGTCIDDHKLAVSNVFGNKLGLWIVVPQQLVVEVGIDIVYMVTGGKSFQKSIVLVCKDNCKDIKLTYYIMIFASVHFVLSHLPNFNAISGVSLVAAIMSLSYCTIAWGASIVLGVQPDVEYEYRAENTGEGIFNFFSGLGEVAFAYAGHNVVLEIQATIPSTPEKPSKGPMWKGVLVAYIIVALCYFPVAIIGYWIFGNSVSNNILISLEKPTWLIVLANAFVVITLLGAYQLYAIPVFDMLETYLVRKLKFKPTWYLRFMTRNLYVAFTMFVGIIFPFLWGLLGFLGGFAFAPTTYFLPCIMWLSIYKPKRWGLSWTSNWICIIVGVMLTVLAPIGGLRTIIIQAKDYNFFYWDSLSGSLAFGKKG

SEQ ID NO: 36335 - protein, 248 aa, Cocos nucifera
MGYLNSIAGIQADGSPVSGGGLSRNGKFSYGYASSPGKRASMEDFYDTRIDGDDGEIVGLFGVFDGHGGARAAEYVKQNLFSNLIRHPKFISDTKLAIADAYNHTDSEFLKSENNQNRDAGSTASTAVLVGDRLLVANVGDSRAVICRGGNALAVSKDHKPDQSDERQRIEDAGGFVMWAGTWRVGGVLAVSRAFGDRLLKQYVVADPEIQEEVVDGSLEFLILASDGLWDVVSNEEAVAMIKPIEDP

SEQ ID NO: 36336 - protein, 272 aa, Ipomoea purpurea
MVNSSARWSPRVRKGAWSEEEDDLLRKCIQKFGEGKWHLVPFRAGLNRCRKSCRLRWLNYLHPDIKRGHFSLEEADLILRLHKLLGNRWSLIAGRIPGRTANDVKNYWHSHLKKKVVSMHMASSNSSRQDNNWDDEKGKAPQIKENILFRPRPRRFFRTSLSSPALSTLTGKAKAVVYDAPPPPPPPPHQLQPQPEATSPAADLLMVFNVQQNSNSIETNLPAQTTAPSSHDGVKWWEDLLYDDSHQGLIDWTTDDDFPIDVDLLKLLDTTI

SEQ ID NO: 36337 - protein, 269 aa, Ipomoea nil
MVNSSARWSPRVRKGAWSEEEDDLLRKCIQKFGEGKWHLVPFRAGLNRCRKSCRLRWLNYLHPDIKRGHFSLEEADLILRLHKLLGNRWSLIAGRIPGRTANDVKNYWHSHLKKKVVGMHMASSNSSRQDNNWDDEKGKAPQIKENILFRPRPRRFFRTSLSSPALSTLTGKAKAVAYDAPPPPHHHQLQAQPEATSPPADLLMVFNVQQNNNSMATNFPAQTTAPPSHDGVKWWDLLYDDDHQGLIDWTTDDDFPIDVDLLKLLDTTI

SEQ ID NO: 36338 - protein, 2651 aa, Arabidopsis thaliana
MAKWFLNLVFVALNHSRFGISRSKTAWNLDGGFTDIDICCQSGNYVFTIKKKVTLLAAYRNSSACGSRWRRKKKKKKNLKRAMKHIFKKLHRGGNQEQQNRTNDAAPPSDQNRIHVSANPPQATPSSVTETLPVAGATSSMASPAPTAASNRADYMSSEEEYQVQLALAISASNSQSSEDPEKHQIRAATLLSLGSHQRMDSRRDSSEVVAQRLSRQYWEYGVLDYEEKVVDSFYDVYSLSTDSAKQGEMPSLEDLESNHGTPGFEAVVVNRPIDSSLHELLEIAECIALGCSTTSVSVLVQRLAELVTEHMGGSAEDSSIVLARWTEKSSEFKAALNTCVFPIGFVKIGISRHRALLFKVLADSVRLPCRLVKGSHYTGNEDDAVNTIRLEDEREYLVDLMTDPGTLIPADFASASNNTVEPCNSNGNKFPTAQFSNDVPKLSEGEGSSHSSMANYSSSLDRRTEAERTDSSYPKVGPLRNIDYSSPSSVTSSTQLENNSSTAIGKGSRGAIIECSRTNMNIVPYNQNSEEDPKNLFADLNPFQNKGADKLYMPTKSGLNNVDDFHQQKNNPLVGRSPAPMMWKNYSCNEAPKRKENSYIENLLPKLHRDPRYGNTQSSYATSSSNGAISSNVHGRDNVTFVSPVAVPSSFTSTENQFRPSIVEDMNRNTNNELDLQPHTAAVVHGQQNDESHIHDHRKYTSDDISTGCDPRLKDHESTSSSLDSTSYRNDPQVLDDADVGECEIPWNDLVIAERIGLAYSFWRSYVLMLILFWLGSYGEVYHADWHGTEVAVKKFLDQDFSGAALAEFRSEVSHKFTCVYLLVRIMRRLRHPNVVFFLGAVTRPPNLSIVTEFLPRGSLYRILHRPKSHIDERRRIKMALDVAMGMNCLHTSTPTIVHRDLKTPNLLVDNNWNVKVGDFGLSRLKHNTFLSSKSTAGTPEWMAPEVLRNEPSNEKCDVYSFGVILWELATLRLPWRGMNPMQVVGAVGFQNRRLEIPKELDPVVGRIILECWQTDPNLRPSFAQLTEVLKPLNRLGTPVNIIVGSHVWFEDPEVAWIDGEVEKINGQEVVIQATTGKKVQSSITEILTFQLHTYSVTAKLSKIYPKDVEAPAGGVDDMTKLSYLHEPGVLQNLKIRYELNEIYTYTGNILIAINPFQRLPHIYDAHMMQQYKGAPLGELSPHVFAVADVAYRAMINEGKSNSILVSGESGAGKTETTKMLMRYLAYLGGRAVTEGRTVEQQVLESNPVLEAFGNAKTVRNNNSSRFGKFVEIQFDKQGRISGAAIRTYLLERSRVCQISDPERNYHCFYLLCAAPQEEIEKYKLGHPKTFHYLNQSKCFELVGISDAHDYLATRRAMDIVGISEKEQVSFCKQLHLEAIFRVVAAILHIGNIDFTKGKEVDSSVPKDEKSKFHLKTAAELLMCDLKALEDALCKRVMITPEEVIKRSLDPQSAVTSRDGLAKTVYSRLFDWLVDKINKSIGQDANSRSLIGVLDIYGFESFKTNRLAVCHSLLIPFCCSFEQFCINFTNEKLQQHFNQHVFKMEQEEYTKEAIDWSYIEFVDNQDVLDLIEKVISEPRKDNVNKITPHTGWILLSHFISPFIFHLQKPGGIVALLDEACMFPKSTHETFANKLYQTFKTHKRFIKPKLSRTDFAVAHYAGEVLYQSELFLDKNKDYVIPEHQDLLGASKCPFVVGLFPPLPEETSKSSKFSSIGSRFKLQLQQLMETLNCTEPHYIRCVKPNNLLKPAIFENVNIMQQLRCGGVLEAIRISCAGYPTRKPFFEFINRFGLLSPAALEGNFDEKVACQKILDNMGLKGYQIGKTKVFLRAGQMAELDARRAEVLSSAAKKIQRRIRTHQAQKRFIVLRKATISLQAICRGRLSCKHYDNLRREAAAVKIQKNGRRHYSRKSYKKLHVASLVVQTGLRAMAARKQFRFRKQTKAATIVQAQWRCHRAISYYKKLKNGVVLSQTRWRGRLAKRELRKLKMAARETGALKEAKDMLEKKVEELTYRVQLEKRSRGDLEEAKTQEILKLKSSFEEMRKKVDETNALLLKEREAAKKAAEEAPPVIKETQILVEDTKKIELMTEELESVKVTLENEKQRADDAVRKFEEAQESLEDKKKKLEETEKKGQQLQESLTRMEEKCSNLESENKVLRQQAVSMAPNKFLSGRSRSILQRGSESGHLAVDARSNLDLHSHSINHRDPSEVEDKPQKSLNEKQQENQDLLIRSIVQHLGFQGNRPITACIIYKCLLQWRSFEVERTSVFDRIIQTIGHAIETQDNNNTLAYWLSNTSTLLLLLQRTLKASGAAGMAPQRRRSSSATLFGRMSQSFRGAPPGVNLAMINGAAGGGADTFRQVEAKYPALLFKQQLTAYVEKIYGMIRDNLKKEISPLLGLCIQAPRTSRASLVKGASRSVGNTAAQQALIAHWQGIVKSLTNFLNTLKSNNVPSFLVRKVFTQIFSFINVQLFNSLLLRRECCSFSNGEYVKAGLSELEHWCFKATNEYAGSSWDELKHIRQAIGFLVVHQKPKKTLDEISHDLCPVLSIQQLYRISTMYWDDKYGTHSVSPDVSDHLKLLMICVIANMRVLMTEDSNNAVSNSFLLDDDSSIPFSVDDLSKSMEKFEIADIEPPPLIRENSGFSFLLPVSE

SEQ ID NO: 36339 - protein, 871 aa, Arabidopsis thaliana
MERHCLFFVIFSLILHLVQAQDPIGFINLDCGLSIQGSPYKESSTGLTYTSDDGFVQSGKIGKITKELESLYKKPERTLRYFPDGVRNCFSLNVTRGTKYLIKPTFLYGNYDGRNVIPDFDLYIGPNMWITVNTDNTIKEILHVSKSNTLQVCLVKTGTSIPYINTLELRPLADDIYTNESGSLNYLFRVYYSNLKGYIEYPDDVHDRIWKQILPYQDWQILTTNLQINVSNDYDLPQRVMKTAVTPIKASTTTMEFPWNLEPPTSQFYLFLHFAELQSLQANETREFNVVLNGNVTFKSYSPKFLEMQTVYSTAPKQCDGGKCLLQLVKTSRSTLPPLINAMEAYTVLDFPQIETNVDEVIAIKNIQSTYGLSKTTWQGDPCVPKKFLWDGLNCNNSDDSTPPIITSLNLSSSGLTGIIVLTIQNLANLQELDLSNNNLSGGVPEFLADMKSLLVINLSGNNLSGVVPQKLIEKKMLKLNIEGNPKLNCTVESCVNKDEEGGRQIKSMTIPIVASIGSVVAFTVALMIFCVVRKNNPSNDEAPTSCMLPADSRSSEPTIVTKNKKFTYAEVLTMTNNFQKILGKGGFGIVYYGSVNGTEQVAVKMLSHSSAQGYKQFKAEVELLLRVHHKNLVGLVGYCEEGDKLALIYEYMANGDLDEHMSGKRGGSILNWGTRLKIALEAAQGLEYLHNGCKPLMVHRDVKTTNILLNEHFDTKLADFGLSRSFPIEGETHVSTVVAGTIGYLDPEYYRTNWLTEKSDVYSFGVVLLVMITNQPVIDQNREKRHIAEWVGGMLTKGDIKSITDPNLLGDYNSGSVWKAVELAMSCMNPSSMTRPTMSQVVFELKECLASESSREVSMTFGTEVAPMAR

SEQ ID NO: 36340 - protein, 883 aa, Arabidopsis thaliana
MERHFVFIATYLLIFHLVQAQNQTGFISVDCGLSLLESPYDAPQTGLTYTSDADLVASGKTGRLAKEFEPLVDKPTLTLRYFPEGVRNCYNLNVTSDTNYLIKATFVYGNYDGLNVGPNFNLYLGPNLWTTVSSNDTIEEIILVTRSNSLQVCLVKTGISIPFINMLELRPMKKNMYVTQSGSLKYLFRGYISNSSTRIRFPDDVYDRKWYPLFDDSWTQVTTNLKVNTSITYELPQSVMAKAATPIKANDTLNITWTVEPPTTQFYSYVHIAEIQALRANETREFNVTLNGEYTFGPFSPIPLKTASIVDLSPGQCDGGRCILQVVKTLKSTLPPLLNAIEAFTVIDFPQMETNENDVAGIKNVQGTYGLSRISWQGDPCVPKQLLWDGLNCKNSDISTPPIITSLDLSSSGLTGIITQAIKNLTHLQILDLSDNNLTGEVPEFLADIKSLLVINLSGNNLSGSVPPSLLQKKGMNVEGNPHILCTTGSCVKKKEDGHKKKSVIVPVVASIASIAVLIGALVLFLILRKKRSPKVEGPPPSYMQASDGRLPRSSEPAIVTKNRRFSYSQVVIMTNNFQRILGKGGFGMVYHGFVNGTEQVAVKILSHSSSQGYKQFKAEVELLLRVHHKNLVGLVGYCDEGDNLALIYEYMANGDLKEHMSGTRNRFILNWGTRLKIVIESAQGLEYLHNGCKPPMVHRDVKTTNILLNEHFEAKLADFGLSRSFLIEGETHVSTVVAGTPGYLDPEYHRTNWLTEKSDVYSFGILLLEIITNRHVIDQSREKPHIGEWVGVMLTKGDIQSIMDPSLNEDYDSGSVWKAVELAMSCLNHSSARRPTMSQVVIELNECLASENARGGASRDMESKSSIEVSLTFGTEVSPNAR

SEQ ID NO: 36341 - protein, 869 aa, Arabidopsis thaliana
MKSLHWFLHLLIIAFTVLRSVEAQNQAGFISLDCGLVPKETTYTEKSTNITYKSDVDYIDSGLVGKINDAYKTQFQQQVWAVRSFPVGQRNCYNVNLTANNKYLIRGTFVYGNYDGLNQFPSFDLHIGPNKWSSVKILGVTNTSMHEIIHVVPQDSLEVCLVKTGPTTPFISSLEVRPLNNESYLTQSGSLMLFARVYFPSSSSSFIRYDEDIHDRVWNSFTDDETVWISTDLPIDTSNSYDMPQSVMKTAAVPKNASEPWLLWWTLDENTAQSYVYMHFAEVQNLTANETREFNITYNGGLRWFSYLRPPNLSISTIFNPRAVSSSNGIFNFTFAMTGNSTLPPLLNALEIYTVVDILQLETNKDEVSAMMNIKETYGLSKKISWQGDPCAPQLYRWEGLNCSYPDSEGSRIISLNLNGSELTGSITSDISKLTLLTVLDLSNNDLSGDIPTFFAEMKSLKLINLSGNPNLNLTAIPDSLQQRSKKVPMVAIAASVAGVFALLVILAIFFVIKRKNVKAHKSPGPPPLVTPGIVKSETRSSNPSIITRERKITYPEVLKMTNNFERVLGKGGFGTVYHGNLDGAEVAVKMLSHSSAQGYKEFKAEVELLLRVHHRHLVGLVGYCDDGDNLALIYEYMANGDLRENMSGKRGGNVLTWENRMQIAVEAAQGLEYLHNGCRPPMVHRDVKTTNILLNERCGAKLADFGLSRSFPIDGECHVSTVVAGTPGYLDPEYYRTNWLSEKSDVYSFGVVLLEIVTNQPVIDKTRERPHINDWVGFMLTKGDIKSIVDPKLMGDYDTNGAWKIVELALACVNPSSNRRPTMAHVVMELNDCVALENARRQGSEEMYSMGSVDYSLSSTSDFAPGAR

SEQ ID NO: 36342 - protein, 865 aa, Arabidopsis thaliana
MKSLHFCLLFMIVSFTVSRPVEAQDQAGFISLDCGLVPKETTYVETSTNITYKSDANYTDSGLVGKINDAHKTLVQQPLWALRSFPEGERNCYNFNLTVNSTYLIRGTFLYGNYDGLNQSPSFDLHIGASKWTSVNIVGVTDTVMPEIIHVLTQKRLQVCLVKTGKTTPFISSLELRPLINNIYIAESGSMVLQNRVYFPSDSTSIVRYDEDIHDRVWNPVSDDDSSSISTDLQVQTNNLYDVPQFVMKTAAIPKDASAPWSLVWTIDNTTALSYVYMHFAEIQDLKANDLREFDITYNGGKLWFSQFRPNKLSILTMFSQVPLTSSNGEYNFTFEMTSNSTLPPLINALEIYTGLEILQLQTDKDEVSAMMNIKTTYDLSKKISWQGDPCAPQLYRWEGLDCSYPDTEASRIISLNLNASGLNGTITSDITKLTQLSELNLSGNPKLNLTVPDSLQQRVNNKSLTLILGEKVKMNPTAKKESKKVPIVPIAASVAGVFALIVILAIFFIVKGKKGKSAEGPPLSVTSGTAKSETRSSNPSIMRKDRKITYPQVLKMTNNFERVLGKGGFGTVYHGNMEDAQVAVKMLSHSSAQGYKEFKAEVELLLRVHHRHLVGLVGYCDDGDNLALIYEYMANGDLRENMLGKRGGNVLTWENRMQIAVEAAQGLEYLHNGCTPPMVHRDVKTTNILLNAQCGAKLADFGLSRSFPIDGECHVSTVVAGTPGYLDPEYYRTNWLSEKSDVYSFGVVLLEIVTNQPVINQTRERPHINEWVGFMLSKGDIKSIVDPKLMGDYDTNGAWKIVELGLACVNPSSNLRPTMAHVVIELNECVAFENARRQGSEEMYTRSSTNFSHTSASEFSPGAR

SEQ ID NO: 36343 - protein, 872 aa, Arabidopsis thaliana
MKSIHGFLLFLITAYVILESVQAQDQLGFISLDCGLVPKNATYTEKTTNITYKSDANYIDSGLVGRISAEYKAQLQQQTWTVRSFPEGERNCYNFNLTAKSRYLIRATFTYGNYDGLRQVPKFDIHIGPSKWTSVKLDGVGNGAVLEMIHVLTQDRLQICLVKTGKGIPFISSLELRPLNNNTYLTQSGSLIGFARVFFSATPTFIRYDEDIHDRVWVRQFGNGLKSISTDLLVDTSNPYDVPQAVAKTACVPSNASQPLIFDWTLDNITSQSYVYMHFAEIQTLKDNDIREFNITYNGGQNVYSYLRPEKFEISTLFDSKPLSSPDGSFSLSFTKTGNSTLPPLINGLEIYKVLDLLELETDQDEVSAMINIKATYDLSKKVSWQGDPCAPKSYQWEGLNCSYPNSDQPRIISLNLAENKLTGTITPEISKLTQLIELDLSKNDLSGEIPEFFADMKLLKLINLSGNLGLNSTIPDSIQQRLDSKSLILILSKTVTKTVTLKGKSKKVPMIPIVASVAGVFALLVILAIFFVVRRKNGESNKGTNPSIITKERRITYPEVLKMTNNFERVLGKGGFGTVYHGNLEDTQVAVKMLSHSSAQGYKEFKAEVELLLRVHHRNLVGLVGYCDDGDNLALIYEYMANGDLKENMSGKRGGNVLTWENRMQIAVEAAQGLEYLHNGCTPPMVHRDVKTTNILLNERYGAKLADFGLSRSFPVDGESHVSTVVAGTPGYLDPEYYRTNWLSEKSDVYSFGVVLLEIVTNQPVTDKTRERTHINEWVGSMLTKGDIKSILDPKLMGDYDTNGAWKIVELALACVNPSSNRRPTMAHVVTELNECVALENARRQGREEMHTSGYVDFSRSSASEFSPGAR

SEQ ID NO: 36344 - protein, 879 aa, Arabidopsis thaliana
MKTMNGFLLLSTIAFAVFHLVQAQSQSGFISLDCGLIPKDTTYTEQITNITYISDADYIDSGLTERISDSYKSQLQQQTWTLRSFPEGQRNCYNFNLKANLKYLIRGTFVYGNYDGLNQMPKFDLHIGPNKWTSVILEGVANATIFEIIHVLTQDRLQVCLVKTGQTTPFISSLELRPLNNDTYVTQGGSLMSFARIYFPKTAYFLRYSDDLYDRVWVPFSQNETVSLSTNLPVDTSSNSYNVPQNVANSAIIPAEATHPLNIWWDLQNINAPSYVYMHFAEIQNLKANDIREFNITYNGGQVWESSIRPHNLSITTISSPTALNSSDGFFNFTFTMTTTSTLPPLINALEVYTLVENLLLETYQDEVSAMMNIKKTYGLSKKISWQGDPCSPQIYRWEGLNCLYLDSDQPLITSLNLRTSGLTGIITHDISNLIQLRELDLSDNDLSGEIPDFLADMKMLTLVNLKGNPKLNLTVPDSIKHRINNKSLKLIIDENQSSEKHGIKFPLVAILASVAGVIALLAIFTICVIFKREKQGSGEAPTRVNTEIRSSYQSIETKDRKFTYSEILKMTNNFERVLGKGGYGRVYYGKLDDTEVAVKMLFHSSAEQDYKHFKAEVELLLRVHHRHLVGLVGYCDDGDNFALIYEYMANGDLKENMSGNRSGHVLSWENRMQIAMEAAQGLEYLHNGSRPPMVHRDVKTTNILLNELYQAKLADFGLSRSSPVDGESYVSTIVAGTPGYLDPEYYRTNLLSEKTDVYSFGVVLLEIITNQPVIDTTREKAHITDWVGFKLMEGDIRNIIDPKLIKEFDTNGVWKAVELALSCVNPTSNHRPTMPHVVMELKECLDSEIARKQGSQDMFSRDSIELTFSPTGFSPGPR

SEQ ID NO: 36345 - protein, 875 aa, Arabidopsis thaliana
MERHCVLVATFLLMLHIVHAQDQIGFISVDCGLAPRESPYNEAKTGLTYTSDDGLVNVGKPGRIAKEFEPLADKPTLTLRYFPEGVRNCYNLNVTSDTNYLIKATFVYGNYDGLNVGPNFDLYFGPNLWTTVSSNDTIKEIIHVTKTNSLQVCLIKTGISIPFINVLELRPMKKNMYVTQGESLNYLFRVYISNSSTRIRFPDDVYDRKWYPYFDNSWTQVTTTLDVNTSLTYELPQSVMAKAATPIKANDTLNITWTVEPPTTKFYSYMHFAELQTLRANDAREFNVTMNGIYTYGPYSPKPLKTETIYDKIPEQCDGGACLLQVVKTLKSTLPPLLNAIEAFTVIDFPQMETNGDDVDAIKNVQDTYGISRISWQGDPCVPKLFLWDGLNCNNSDNSTSPIITSLDLSSSGLTGSITQAIQNLTNLQELDLSDNNLTGEIPDFLGDIKSLLVINLSGNNLSGSVPPSLLQKKGMKLNVEGNPHLLCTADSCVKKGEDGHKKKSVIVPVVASIASIAVLIGALVLFFILRKKKSPKVEDGRSPRSSEPAIVTKNRRFTYSQVAIMTNNFQRILGKGGFGMVYHGFVNGTEQVAVKILSHSSSQGYKEFKAEVELLLRVHHKNLVGLVGYCDEGENMALIYEYMANGDLKEHMSGTRNRFTLNWGTRLKIVVESAQGLEYLHNGCKPPMVHRDVKTTNILLNEHFQAKLADFGLSRSFPIEGETHVSTVVAGTPGYLDPEYYKTNWLTEKSDVYSFGIVLLELITNRPVIDKSREKPHIAEWVGVMLTKGDINSIMDPNLNEDYDSGSVWKAVELAMSCLNPSSARRPTMSQVVIELNECIASENSRGGASRDMDSKSSIEVSLTFDTELSPTAR

SEQ ID NO: 36346 - protein, 211 aa, Nicotiana tabacum
TEESYQLQLALAIRLSSEATCADNPNFLGPAADESASRDSDSSASAETMSHRLWINGCLSYFDKVPDGFYWIYGMDPYVWTVCSVLQESGRIPSIESLKAVDPTVAPSVEVILIDRYNDPSLKELQIGILSMSASCISVEEVVDQLAKLVCDHMGGAAPAGEDDLVSMSKERSDDLKDCLGTIVLPIGSLSVGLCRHRALLFKVLADIIDL

SEQ ID NO: 36347 - protein, 904 aa, Phaseolus vulgaris
MWITFYVAVLAVLLLQAHAQPGFISIDCGAEAGVSYTERSLGINYVSDANFINTGERRTIASEEISRNNQQQQLWRLRSFPEGKRNCYKINVTSGSNYLIRTTFLYGNYDGRNKLPMFDLLLGANLWSTVTIDDASSGQSNEIIHVPSLDFVQICLVNTGSGTPFITAIEFRTLKNDTYVTESGSLQSSLRWDLGSNISYRYPTDVYDRFWNPQDNKDWTNLSASIPDDSLDQGDYQPGASNMRTAVTPANASAPLVISWEPKDETDEFYVYMHFTEIQELTTNQTRQFDIMRNGELWIPNFSPRYLVVDTLNTSSASAVNGKVITYSLVRTGNSTLPPIISAIEIYRVIDLQKPETLQADVDAITSIKSVYGVKRDWQGDPCAPVAYLWNGLNCSYHGIEFPRITALNLSSSGLSGKIDPSISKLNMLEKLDLSNNNLHDEVPDFLSQLQHLKILHLEKNNLSGSIPSALVEKSKEGSLTLSLGQNPHICEHGQCIDHRNNIVIPLVASICGGLILLVTVTAILWILRRRRKSKASMVEKDQSEISEQHTKQEGSLQQSKKQICSHSDICKITNNFNTIVGKGGFGTVYLGYIYDTPVAVKILSPSSFRGYEQFQAEVTLLLRVHHKNLTSLIGYCDEGSNKSLIYEYMANGNLLEHLSGTHSKSKFLSWEDRLRIAVDAALGKKANFRLCVLTVLLMWHLHKSNIGLEYLQNGCKPPIIHRDVKSSNILLNEHFQAKLSDFGLSKIIPDDGASHLSTVVAGTPGYLDPDYYTNNRLTEKSDVYSFGVVLLEIITGQLVIARNEERSHIIEWVRSLVAIGDIKAIVDSRLEGDFDINSAWKAVEIAMACVSLRPNQRPIMSVVVFELKETLVTELARTKPNSSAESIEPVNLDFSAQLIPLAR

SEQ ID NO: 36348 - protein, 545 aa, Azospirillum brasilense
MKLAEALLRALKDRGAQAMFGIPGDFALPFFKVAEETQILPLHTLSHEPAVGFAADAAARYSSTLGVAAVTYGAGAFNMVNAVAGAYAEKSPVVVISGAPGTTEGNAGLLLHHQGRTLDTQFQVFKEITVAQARLDDPAKAPAEIARVLGAARALSRPVYLEIPRNMVNAEVEPVGDDPAWPVDRDALAACADEVLAAMRSATSPVLMVCVEVRRYGLEAKVAELAQRLGVPVVTTFMGRGLLADAPTPPLGTYIGVAGDAEITRLVEESDGLFLLGAILSDTNFAVSQRKIDLRKTIHAFDRAVTLGYHTYADIPLDGLVDALLERLPPSDRTTRGKEPHAYPTGLQADDGPIAPMDIARAVNDRVRAGQEPLLIAADMGDCLFTAMDMIDAGLMAPGYYAGMGFGVPAGIGAQCVSGGKRILTVVGDGAFQMTGWELGNCRRLGIDPIVILFNNASWEMLRTFQPESAFNDLDDWRFAEMAAGMGGDGVRVRTRAELKAALDKAFATRGRFQLIEAMIPRGVLSDTLARFVQGQKRLHAAPRE

SEQ ID NO: 36349 - protein, 102 aa, Beta vulgaris subsp. vulgaris
MASSSSSSPVALSKRGRPRNSGAKNPVFCSVDGCASDLNQCREYHRRHKVCERHSKTPVVLVGGKKPQFCQHCSGCKKIIREESNAQRLPCLSWLENPTGDF

SEQ ID NO: 36350 - protein, 612 aa, Vigna unguiculata
MLVKGAVVEAPPSVSPSSQGGSGAASKKQLRVLVAGGGIGGLVFALAAKKKGFDVVVFEKDLSAIRGEGQYRGPIQIQSNALAALEAIDSEVAEEVMRVGCITGDRINGLVDGVSGSWYVKFDTFTPAVERGLPVTRVISRMVLQEILARAVGEDIIMNASNVVNFVDDGNKVTVELENGQKYEGDILVGADGIWSKVRKQLFGHKEAVYSGYTCYTGIADFVPADIETVGYRVFLGHKQYFVSSDVGAGKMQWYAFHKEPPGGVDGPNGKKERLLKIFEGWCDNAVDLILATEEDAILRRDIYDRIPTLTWGKGRVTLLGDSVHAMQPNMGQGGCMAIEDSYQLALELDNAWEQSVKSGSPIDIDSSLRSYERERKLRVAIIHGMARMAALMASTYKAYLGVGLGPLEFLTKFRIPHPGRVGGRFFVDIMMPSMLSWVLGGNSSKLEGRPLSCRLSDKANDQLRQWFEDDEALERAINGEWILIPHGDGTSLSKPIVLSRNEMKPFIIGSAPAEDHPGTSVTIPSPQVSPRHARINYKDGAFFLIDLRSEHGTWIIDNEGKQYRVPPNYPARIRPSEAIQFGSEKVSFRVKVTRSVPRISENERPLTLQEA

SEQ ID NO: 36351 - protein, 667 aa, Arabidopsis thaliana
MGSTPFCYSINPSPSKLDFTRTHVFSPVSKQFYLDLSSFSGKPGGVSGFRSRRALLGVKAATALVEKEEKREAVTEKKKKSRVLVAGGGIGGLVFALAAKKKGFDVLVFEKDLSAIRGEGKYRGPIQIQSNALAALEAIDIEVAEQVMEAGCITGDRINGLVDGISGTWYVKFDTFTPAASRGLPVTRVISRMILQQILARAVGEDVIRNESNVVDFEDSGDKVTVVLENGQRYEGDLLVGADGIWSKVRNNLFGRSEATYSGYTCYTGIADFIPADIESVGYRVFLGHKQYFVSSDVGGGKMQWYAFHEEPAGGADAPNGMKKRLFEIFDGWCDNVLDLLHATEEEAILRRDIYDRSPGFTWGKGRVTLLGDSIHAMQPNMGQGGCMAIEDSFQLALELDEAWKQSVETTTPVDVVSSLKRYEESRRLRVAIIHAMARMAAIMASTYKAYLGVGLGPLSFLTKFRVPHPGRVGGRFFVDIAMPSMLDWVLGGNSEKLQGRPPSCRLTDKADDRLREWFEDDDALERTIKGEWYLIPHGDDCCVSETLCLTKDEDQPCIVGSEPDQDFPGMRIVIPSSQVSKMHARVIYKDGAFFLMDLRSEHGTYVTDNEGRRYRATPNFPARFRSSDIIEFGSDKKAAFRVKVIRKTPKSTRKNESNNDKLLQTA

SEQ ID NO: 36352 - protein, 471 aa, Blumeria graminis
MPTFGFLKKRKKVSLGHRDLDSPASTLSQPASPITPSTSRGLGEPIDTTSSKITSPGQKLGSNITKDHRGTRTTVEDLPSMTDVSHLQQAYRNLSQGSTASKSNLLTIHNLINPPQHDGAGQSKVMPEKHMNNKTERPVQGKAAVAQVRQTKGKYSLSDFEILRTLGTGSFGRVHLVQSKHNQRFYAVKVLKKQQVVKMKQVEHTNDERSMLQEVKHPFLITLWGTFQDSKNLYMVMDFVEGGELFSLLRKSQRFPNPVAKFYAAEVTLALEYLHKKDIIYRDLKPENLLLDRHGHLKITDFGFAKKVTDITWTLCGTPDYLAPEVVSSKGYNKSVDWWSLGILIFEMLCGYTPFWDNGSPMKIYENILKGRVKYPPYIHPDAQDLIQRLITADLTKRLGNLHGGAEGIKSHQWFAEVTWERLAKKDIDAPYVPPVKAGSGDASQFDKYPEETERYGQTGPDEHGSLFENF

SEQ ID NO: 36353 - protein, 607 aa, Zea mays
MGQCYGKAGGASSRRADHDDAVAPPSPLPANGAPTPPQQPATPGRRKSGSATPVHHQAATTAWPSPYPAGGASPLPAGVSPSPARSTPRRFFKRPFPPPSPAKHIKATLAKRLGGGKPKEGTIPEEGGAGVAADSAEAERPLDKTFGFANNFGAKYDLGKEVGRGHFGHTCSALVKKGEYKGHAVAVKIISKAKMTTAISIEDVRREVRILKALSGHNNLVKFYDACEDALNVYIVMELCEGGELLDRILARGGRYTEEDAKAIVVQILSVVSFCHLQGVVHRDLKPENFLFATRDESAPMKLIDFGLSDFIRPDERLNDIVGSAYYVAPEVLHRSYSMEADIWSIGVITYILLCGCRPFWARTESGIFRFVLRADPNFDDSPWPSVSAEAKDFVKRFVNKDYRKRMTAVQALTHPWLRDEQRQIQLDILVFRLVKQYLRATPLKRLALKALSKALREDELLYLRLQFKLLEPRDGLVSLDNFRTALTRYVTDAMRESRVLEFLHALDPLAYRKMDLEEFCAAAISPYQLEALESWEEIAGTAFQHFEQEGNRVISVEELAQELNLAPTHYSIVQDWIRKSDGKLNFLGFTKFLHGVTIRGSNTRRH

SEQ ID NO: 36354 - protein, 372 aa, Burkholderia pseudomallei
MKFIDEARIEVIAGRRGDGSASMRREKFVPFGGPDGGDGGPGGSVYVIADRNINTLIDYPVREKHMARNGENGRGSDCYGKGGDDITLRMPVGTVINDMDTGELIADLTEHDQKVLVAKGGAGGLGNLHFKSSTNRAPRQKTDGKPGERRMLKLELKVLADVGLLGMPNAGKSTFISSVSNAKPKIADYPFTTLAPNLGVVRVGPGKSFVIADIPGLIEGAAEGAGLGHQFLRHLQRTGLLLHLVDLAPFDERVDPVAEARAIVGELRKYDESLYEKPRWLVLNKLDMVPEDERRARVADFIERFGWTGPVFEISALTGQGCEGLVYAIHDYLVEHSDAHRAELAEDLASDVRFRDAPGAGGEPHERDAGAH

SEQ ID NO: 36355 - protein, 354 aa, Saccharomyces cerevisiae
MVIDLEHVVDYIMHIDSQLQLKKASPAKMNSESREDMAINSIKLLAGNSHPDLAEQISKKLGIPLSKVGVYQYSNKETSVTIGESLRDEDVYIIQTGIGEQEINDFLMELLILIHACKIASARKITTVIPNFPYARQDKKDKSRAPITAKLVANLLQTAGADHVITMDLHASQIQGFFHIPVDNLYAEPSVLNYIRTKTDFDNAILVSPDAGGAKRVAALADKLDLNFALIHKERQKANEVSKMVLVGDVTNKSCLLVDDMADTCGTLVKACDTLMEHGAKEVIAIVTHGIFSGSAREKLRNSRLSRIVCTNTVPVDLDLPIADQIDISPTFAEAIRRLHNGESVSYLFTHAPV

SEQ ID NO: 36356 - protein, 442 aa, Pisum sativum
MAKTLISSPSFLGTPLPSLHRTFSPNRTRLFTKVQFSFHQLPPIQSVSHSVDLSGIFARAEGLLYTLADATVAADAAASTDVAAQKNGGWFGFISDGMEFVLKVLKGGLSSVHVPYSYGFAIILLTGIVKAATLPLTKQQVESTLAMQNPQPKIKAIQERYAGNQERIQLETSRLYTQAGVNPLAGCLPTLATIPVWIGLYQALSNVANEGLLTEGFLWIPSLGGPTSIAARQSGSGISWLFPFVDGHPPLGWYDTAAYLVLPVLLIVSQYVSMEIMKPPQTNDPNQKNTLLIFKFLPLMIGYFSLSVPSGLTIYWFTNNVLSTAHKVWLRKLGGAKPAVNENAGGIITAGQAKRSASKPEKGGERFRQLKEEEKKKKLIKALPVEEVQPLASASASNDGSDVENNKEQEVTEESNTSKVSQEVQSFSRERRSKRSKRKPVA

SEQ ID NO: 36357 - protein, 384 aa, Pseudomonas sp. 14-3
MIDVVIVAATRTAIGSFQGSLAEIPAPELGAIVIRRLLEQTGLDAAQVDEVILGQVLTAASGQNPARQAVIRAGLPHVVPAMTLNKVCGSGLKALHLAAQAIRCGDAEVIIAGGMENMSLSPYVLPKARTGLRMGHAQMLDSMIVDGLWDAFNDYHMGITAENLVDKYGISREAQDAFAAASQQKAVAAIEAGRFDAEITPVLIPQRKGDPIAFARDEQPRAGTTAESLAKLKPAFKKDGSVTAGNASSLNDGAAAVLLMSAAKAKALGLSVLAKISAYANAGVDPAIMGIAPVSASRHCLDKAGWSLNELDLIEAIAAWPLVGAGLGCRQGQRQRRRHRPGSPDRRLRLPRAGQPAARDDPPRCQERPGDAVHRRRPGRGAGH

SEQ ID NO: 36358 - protein, 808 aa, Nicotiana tabacum
MTNKAESSDSKGTKRDYSTAILERKKSPNRLVVDEAINDDNSVVALHPDTMEKLQLFRGDTILIKGKKRKDTICIALADDTCDEPKIRMNKVVRNNLRVRLGDVVSVHQCPDVKYGKRVHILPIDDTIEGVTGNLFDAYLKPYFLEAYRPVRKGDLFLVRGGMRSVEFKVIETDPPEYCVVAPDTEIFCEGEPVSREDENRLDEIGYDDVGGVRKQMAQIRELVELPLRHPQLFKSIGVKPPKGILLYGPPGSGKTLIARAVANETGAFFFCINGPEIMSKLAGESESNLRKAFEEAEKNAPSIIFIDEIDSIAPKREKTHGEVERRIVSQLLTLMDGLKSRAHVIVMGATNRPNSIDPALRRFGRFDREIDIGVPDEVGRLEVLRIHTKNMKLAEEVDLERIGKDTHGYVGADLAALCTEAALQCIREKMDVIDLEDETIDAEILNSMAVTNEHFQTALGTSNPSALRETVVEVPNVSWEDIGGLENVKRELQETVQYPVEHPEKFEKFGMSPSKGVLFYGPPGCGKTLLAKAIANECQANFISVKGPELLTMWFGESEANVREIFDKARQSAPCVLFFDELDSIATQRGSSVGDAGGAADRVLNQLLTEMDGMNAKKTVFIIGATNRPDIIDPALLRPGRLDQLIYIPLPDEDSRHQIFKACLRKSPLSKDIDLRALAKYTQGFSGADITEICQRACKYAIRENIEKDIEREKRRSENPEAMEEDVDDEVAEIKPAHFEESMKYARRSVSDADIRKYQAFAQTLQQSRGFGTEFRFSETSTAGGTTGTADPFATSAGGADEDDLYS

SEQ ID NO: 36359 - protein, 641 aa, Bordetella holmesii
MSKIIGIDLGTTNSCVAVMDGGQVKIIENAEGARTTPSIVAYMEDGEILVGAPAKRQAVTNPTNTLYAVKRLIGRKFDEKAVQKDIHLMPYSIVKADNGDAWVEVRGKKQAPPQVSAEVLRKMKKTAEDYLGEPVTEAVITVPAYFNDSQRQATKDAGRIAGLEVKRIINEPTAAALAFGLDKAEKGDRKIAVYDLGGGTFDISIIEIADVDGEMQFEVLSTNGDTFLGGEDFDQRIIDYIIGEFKKEQGVDLSKDVLALQRLKEAAEKAKIELSSSQQTEINLPYITADASGPKHLNLKITRAKLEALVEELIERTIEPCRVAIKDAGVKVSDIDDVILVGGMTRMPKVQEKVKEFFGRDPRKDVNPDEAVAAGAAIQGSVLSGDRKDVLLLDVTPLSLGIETLGGVMTKMIQKNTTIPTRFSQTFSTADDNQPAVTIKVFQGEREIAAGNKGLGEFNLEGIPPAPRGMPQIEVTFDIDANGILHVSAKDKGTGKENKITIKANSGLSEDEIQRMVKDAEANAEEDHRLAELAQARNQADALVHATRKSLTEYGEKLEAAEKESIEAAIKDLENILKTGDKAEIDAKVEALSTASQKLGEKMYADMQAQQQAQQQQAADNAKPVDDNVVDADFKEVKRDQ

SEQ ID NO: 36360 - protein, 165 aa, Oryza sativa
ALVEDNNAVAVSFSEEQEALVLKSWAILKKDSANIALRFLLKIFEVAPSASQMFSFLRNSDVPLEKNPKLKTHAMSVFVMTCEAAAQLRKAGKVTVRDTTLKRLGATHLKYGVGDAHFEVVKFALLDTIKEEVPADMWSPAMKSAWSEAYDHLVAAIKQEMKPAE

SEQ ID NO: 36361 - protein, 165 aa, Oryza sativa
ALVEDNNAVAVSFSEEQEALVLKSWAILKKDSANIALRFWLKIFEVAPSASQMFSFLRNSDVPLEKNPKLKTHAMSVFVMTCEAAAQLRKAGKVTVRDTTLKRLGATHLKYGVGDAHFEVVKFALLDTIKEEVPADMWSPAMKSAWSEAYDHLVAAIKQEMKPAE

SEQ ID NO: 36362 - protein, 323 aa, Silicibacter sp. TM1040
MTPRELTCDETLAEMARVLTVEAAALTQMASEVGDPQLKAVEILEAMEGRVIVSGVGKSGHIGNKIAATLASTGTPAQFVHATEASHGDLGMVTPRDVCLVISNSGETSELADIVTYSRRFAIPLIAITRKADSTLATQADVVLLLPDAPEACGIGMAPTTSTTATLAMGDALAVALMKRRGFEREDFKVFHPGGKLGAQLMLVDGLMHTGEALPLVAPETPMTEALLIMTAKGFGLAGLVEGGRLTGIITDGDLRRNMDGLMARSAGEVATRGPKVIRRGSLASEALHDMNSRKISALFVLDNEDRVAGLLHIHDCLRAGLA

SEQ ID NO: 36363 - protein, 523 aa, Silicibacter sp. TM1040
MRTVGHALAQTLVEQGTEIIFGIPGVHTIELYRGIEGAGIRHITPRHEQGAGFMADGYARIAGKPGVVFVITGPGLINTLTPMAQARADSIPMIVVTGVNRRDSLGKGLGLLHELPDQLGLSQTISKHAEQVEDASALEGVMARVFGALQGRPAPVHVEVPTDVMTLPASETVTIPDPEPKAASDLTPILDALARCESPVILAGGGCRTQNLALLKLAQRLDAPVVQTVNARGLMHAHPLTVPASPSLQSVRDLIAEADCVLALGTEMGPTDYDMYATGTYPEMSNLLRIDICDDQLSRHEAACRLTGDLNEILPVLAEQSPGKSNARGSERAEKARLAARAEIEALTPGYARFVSQIETLRDACPDAIFVGDSTQAVYAANLYYDHNRPGGWFNGATGFGALGYAIPAAIGAALADPSAPVVALMGDGGAQFTLPELGVARDENLPILFVVWNNNAFLEISNAMEAAGISPTGCHPSAPDFEAAAAAYRLDFRRIAPEQLQNALSEILPLNGPMLLEIDMTG

SEQ ID NO: 36364 - protein, 355 aa, Silicibacter sp. TM1040
MPRNSERTVWTDAEMLECVSIIPEMDNTASFTFKAPSGALFEYDAGQFMTLEIPVPGGPLHRTYTISSSPSRPRTITITAKAQADSIGTRWMLDNLRPGSRIKALGPAGLFTNAGSMAKKFLFISAGSGITPMMSMTTNMWDDGDNLDIVFVNCAKRPSEIIFRQRLEQMASRSEGLDLKFVVEEPDPYRPWTGYQGMFNQLMLGLMAPDYLEREVYCCGPEPFMQAVRDALAGLGFDMDNYHQESFHAPVETSAEQPDFDDVVPDDDTKAEVTFAASGVTAKVAETDTILAAARANGLNIPSGCTFGVCGTCKVKKTSGEVHMVHNGGISDDDIDAGYILACCSNPIGKVAVDI

SEQ ID NO: 36365 - protein, 491 aa, Silicibacter sp. TM1040
MSDNNSKSHLVAKSGFFAGLHPGMGTAAKGMIAFFVIFTVLNVDLASGLYASVRAWIEGWFSWYYISLLIGVMFFCFWLMGSRFGKLRLGEDDSRPEFGKFSWFAMLFSAGIGVGILFFGVAEPIFYFDNSGAFGYPNNPHADMAGHMDMDMLRARDAMRVAFFHWGFHGWALYVLVGLCLAYFGFRKRLPLTMRSTLYPILGERIYGPWGHLVDLLAVFGSVFGIATSLGLGSTQIATGLNVLFGLEVTLTLKIVLIVIVSVIATASTVSGVARGIRFISEWNIWLSIALLLGFLVLGPAKWLMAFFITSVGDYLWHFIPMGYWTATEEPNVAWQGGWTIFYWGWWIAWAPLVGMFIARISYGRTIREFMVGVLCVPTIAVFFWLCIFGGTAIWQEMHMAGGPAAEGGAGIIATVRNWELPGALYGTIANIGETSWMGDMSWTAWPMSLLANLSMFERGAKDLVVFMDDLESVVGSGRKLTANELRKRIQ

SEQ ID NO: 36366 - protein, 514 aa, Silicibacter sp. TM1040
MSDTSLETHLKKSRLNTPLFLISGGFIALFCIAALIDLEGLSAAVDWGFNVSATYFGLYWQVLLLATFLIGLVLCVLPGGKAIMGNLAAPEFTLFQWGSMIMCTLLAGGGVFWAAGEPIAHFLYSPPLYGAEGGTEAAVNPAIAQSFMHWGFLAWAILGSLSTVMLMHYHYEKGLPLAPRTLLYPLFGDKAINGPIGLIADASSIIAVVAGTVGPIGFLGLQVSYGLSDLFGLPDVFATQFMVIGGLVAIYTISAMTGLSRGIQLLSKINVILAAALLIFVLVAGPTGFIFGSFFSGFGTYLGNFFQMALFRGDAGVFGEPGWLGWWTVFFWGWFMGYGPLMAMFIARVSRGRSIRSIIIMLSIIAPIVTNFWFTIIGGTGISMELAAPGTISTAFEGFNLPAALLAITSNLPMGFLISLLFLILTTIFVATTGDSMSYVISATMSDGENPPTMVRIFWGVAMGIMAIILISVGSGGVSKLQSFIVVTAVPVSLILLPSLWDALRITIAKGREQ

SEQ ID NO: 36367 - protein, 374 aa, Silicibacter sp. TM1040
MRIGCPTEIKPQEFRVGMTPDAAREAIAHGHQVMIQKGAGLGAGFPDEDYLAAGAAIIDTAEEIFADADMIVKVKEPQAVERKMLREGQLLFTYLHLAPDPEQTHDLLASGCTAIAYETVTDDRGGLPLLAPMSEVAGRLAPQVGAYTLQKANGGRGVLMGGVPGVAPAKVVVVGGGVVGTHAAKIAAGMGADVTVLDRSLPRLKYLDDVFGGTFKNRYSTAGATAELIRDADMVIGAVLIPGAAAPKLVSRADLSDMKPGAVLVDVAIDQGGCFETSRATTHADPIYEVDGIMHYCVANMPGAVARTSTQALGNATLPFLLALADKGWRQACADDPHLLNGLNVHAGKLTYYAVGRALGLDVLSPSLALREGT

SEQ ID NO: 36368 - protein, 588 aa, Silicibacter sp. TM1040
MPSFRQYFPILVWGRDYDKSALSNDLIAAVIVTIMLIPQSLAYALLAGLPPEAGIYASIAPILLYAVFGTSRALAVGPVAVVSLLTASAVGQVAEQGTAGYVVATLTLAFLSGSFLVLMGVLKLGFIANFLSHPVIAGFITASGILIATSQIKHILGIRAEGHTLPEMLYSIALRLGEVNWITLLIGASATGFLFWARKHLKQTLHGMGTPPLLADILNKAGPVAAVVTTTVVVWGFDLAEKGVKIVGEVPQGLPPLTMPGFAPDLIGALLVPAILISIIGFVESVSVAQTLAAKRRQRIDPDQELIGLGAANLGAAFTGGYPVTGGFARSVVNFDAGAETPAAGAFTAIGLALAAVALTPLVYYLPIATLAATIIVAVLSLVDLSILKKTWTYSHADFIAVAATILLTLGLGVEIGVASGVILSVVLHLYKTSRPHVAEVGLVPGTQHFRNIDRHNVQTDPRLVSLRVDESLYFVNARFLEDLIQKRVTEGCAIKHVVLMFSAVNMVDYSALESLEAINHRLKDMGVGLHLSEVKGPVMDRLQRSDFIDEMNGKIFLSQYEAWANLTAGAQQGAADTGQGDQLRCGA

SEQ ID NO: 36369 - protein, 356 aa, Silicibacter sp. TM1040
MARFHPLEVTDIKKTIRDAVVVTLKPLNGAAAEFDFTQGQYLTFRRDFDGTELRRSYSICAGKDEGILQVGIKRVDGGAFSTWANTVLKVGDTVEAMPPQGRFFTDLDAAAEKHYLGFAGGSGITPVLSILKTTLQAEPQSRFTLVYANKGINSIMFREEIEDLKNRYMGRLSVIHVLETDAQEVDLFTGLVTQEKCAELFERWIPIQSVDTAFICGPEPMMLGIAEALRTAGLSDEQIKFELFASNQPGRAAKKATSGDAAASAPVTAAITLDGATRSVTLDRNTSVLEAALENAMDAPWSCRAGVCSTCRCRVIEGEVEMAANHALEDDEVAKGFVLSCQAYPLSDALVVSYDE

SEQ ID NO: 36370 - protein, 391 aa, Silicibacter sp. TM1040
MTNVVIASAARTAVGSFGGAFATTPAHDLGAAVLEAVVARAGIDKSEVSETILGQVLTAAQGQNPARQAHINAGLPKESAAWGINQVCGSGLRAVALGAQHIQLGDASIVAAGGQENMTLSPHAANLRAGHKMGDMSYIDTMIRDGLWDAFNGYHMGQTAENVAEQWQISRDMQDEFAVASQNKAEAAQKAGKFADEITPFVVKHRKGDITVDADEYIRHGATIEAMQKLRPAFTRDGSVTAANASGLNDGAAATLLMSADEAEKRGIEPLARIASYATAGLDPSIMGVGPVFASRKALDKAGWSVDDLDLVEANEAFAAQACAVNKDMGWNPEIVNVNGGAIAIGHPIGASGCRVLNTLLFEMKRRGAKKGLATLCIGGGMGVAMCVERP

SEQ ID NO: 36371 - protein, 644 aa, Oryza sativa Indica Group
MATTAAAAAATLSAAATAKTGRKNHQRHHVLPARGRVGAAAVRCSAVSPVTPPSPAPPATPLRPWGTAEPRKGADILVEALERCGVSDVFAYPGGASMEIHQALTRSPVITNHLFRHEQGEAFVASGYARASGRVGVCVATSGPGATNLVSALADALLDSVPMVAITGQVPRRMIGTDAFQETPIVEVTRSITKHNYLVLDVEDIPRVIQEAFFLASSGRPGPVLVDIPKDIQQQMAVPAWDTSMNLPGYIARLPKPPATELLEQVLRLVGESRRPILYVGGGCSASGDELRRFVELTGIPVTTTLMGLGNFPSDDPLSLRMLGMHGTVYANYAVDKADLLLAFGVRFDDRVTGKIEAFASRAKIVHIDIDPAEIGKNKQPHVSICADVKLALQGLNALLDQSTTKTSSDFSAWHNELDQQKREFPLGYKTFGEEIPPQYAIQVLDELTKGEAIIATGVGQHQMWAAQYYTYKRPRQWLSSAGLGAMGFGLPAAAGASVANPGVTVVDIDGDGSFLMNIQELALIRIENLPVKVMVLNNQHLGMVVQWEDRFYKANRAHTYLGNPECESEIYPDFVTIAKGFNIPAVRVTKKSEVRAAIKKMLETPGPYLLDIIVPHQEHVLPMIPSGGALKDMILDGDGRTVY

SEQ ID NO: 36372 - protein, 644 aa, Oryza sativa Indica Group
MATTAAAAAATLSAAATAKTGRKNHQRHHVLPARGRVGAAAVRCSAVSPVTPPSPAPPATPLRPWGTAEPRKGADILVEALERCGVSDVFAYPGGASMEIHQALTRSPVITNHLFRHEQGEAFVASGYARASGRVGVCVATSGPGATNLVSALADALLDSVPMVAITGQVPRRMIGTDAFQETPIVEVTRSITKHNYLVLDVEDIPRVIQEAFFLASSGRPGPVLVDIPKDIQQQMAVPVWDTSMNLPGYIARLPKPPATELLEQVLRLVGESRRPILYVGGGCSASGDELRRFVELTGIPVTTTLMGLGNFPSDDPLSLRMLGMHGTVYANYAVDKADLLLAFGVRFDDRVTGKIEAFASRAKKSLVDIDPAEIGKNKQPHVSICADVKLALQGLNALLDQSTTKTSSDFSAWHNELDQQKREFPLGYKTFGEEIPPQYAIQVLDELTKGEAIIATGVGQHQMWAAQYYTYKRPRQWLSSAGLGAMGFGLPAAAGASVANPGVTVVDIDGDGSFLMNIQELALIRIENLPVKVMVLNNQHLGMVVQWEDRFYKANRAHTYLGNPECESEIYPDFVTIAKGFNIPAVRVTKKSEVRAAIKKMLETPGPYLLDIIVPHQEHVLPMIPSGGALKDMILDGDGRTVY

SEQ ID NO: 36373 - protein, 644 aa, Oryza sativa Indica Group
MATTAAAAAATLSAAATAKTGRKNHQRHHVLPARGRVGAAAVRCSAVSPVTPPSPAPPATPLRPWGTAEPHKGADILVEALERCGVSDVFAYPGGASMEIHQALTRSPVITNHLFRHEQGEAFAASGYARASGRVGVCVATSGPGATNLVSALADALLDSVPMVAITGQVPRRMIGTDAFQETPIVEVTRSITKHNYLVLDVEDIPRVIQEAFFLASSGRPGPVLVDIPKDIQLQMAVPVWDTSMNLPGYIARLPKPPATELLEQVLRLVGESRRPILYVGGGCSASGDELRRFVELTGIPVTTTLMGLGNFPSDDPLSLRMLGMHGTVYANYAVDKADLLLAFGVRFDDRVTGKIEAFASRAKIVHIDIDPAEIGKNKQPHVSICADVKLALQGLNALLDQSTTKTSSDFSAWHNELDQQKREFPLGYKTFGEEIPPQYAIQVLDELTKGEAIIATGVGQHQMWAAQYYTYKRPRQWLSSAGLGAMGFGLPAAAGASVANPGVTVVDIDGDGSFLMNIQELALIRIENLPVKVMVLNNQHLGMVVQWEDRFYKANRAHTYLGNPECESEIYPDFVTIAKGFNIPAVRVTKKSEVRAAIKKMLDTPGPYLLDIIVPHQEHVLPMIPSGGAFKDMILDGDGRTVY

SEQ ID NO: 36374 - protein, 644 aa, Oryza sativa Indica Group
MATTAAAAPATLSAAATAKTGRKNHQRHHVLPARGRVGAAAVRCSAVSPVTPPSPAPPATPLRPWGPAEPRKGADILVEALERCGVSDVFAYPGGASMEIHQALTRSPVITNHLFRHEQGEAFAASGYARASGRVGVCVATSGPGATNLVSALADALLDSVPMVAITGQVPRRMIGTDAFQETPIVEVTRSITKHSYLVLDVEDIPRVIQEAFFLASSGGPGPVLVDIPKDIQQQMAVPVWDTSMDLPGYIARLPKPPATELLEQVLRLVGESRRPILYVGGGCSASGDELRRFVELTGIPVTTTLMGLGNFPSDDPLSLRMLGMHGTVYANYAVDKADLLLAFGVRFDDRVTGKIEAFASRAKIVHIDIDPAEIGKNKQPHVSICADVKLALQGLNALLDQSTTKTSSDFSAWHNELDQQKREFPLGYKTFGEEIPPQYAIQVLDELTKGEAIIATGVGQHQMWAAQYYTYKRPRQWLSSAGLGAMGFGLPAAAGASVANPGVTVVDIDGDGSFLMNIQELALIRIENLPVKVMVLNNQHLGMVVQWEDRFYKANRAHTYLGNPECESEIYPDFVTIAKGFNIPAVRVTRKSEVRAAIKKMLDTPGPYLLDIIVPHQEHVLPMIPSGGAFKDMILDGDGRTVY

SEQ ID NO: 36375 - protein, 642 aa, Silicibacter sp. TM1040
MSKVIGIDLGTTNSCVAIMDGSQPRVIENAEGARTTPSIVAFTDEERLVGQPAKRQAVTNPDNTIFGVKRLIGRRFDDSDLAKDKKNLPFAVINGGNGDAWVEAKSEKYSPSQISAFILGKMKETAESYLGEEVTQAVITVPAYFNDAQRQATKDAGKIAGLEVLRIINEPTAAALAYGLDKAETQTIAVYDLGGGTFDVTILEIDDGLFEVKSTNGDTFLGGEDFDMRIVNYLADEFKKEHGVDLTKDKMALQRLKEAAEKAKIELSSSSQTEINQPFISMDPSSGQPLHLVIKLTRAKLESLVGDLIKNSMKPCAAALKDAGLSASDIDEVVLVGGMTRMPKVIEEVTKFFGKEPHKGVNPDEVVAMGAAIQAGVLQGDVKDVVLLDVTPLSLGIETLGGVFTRLIDRNTTIPTKKSQVFSTAEDNQNAVTIRVFQGEREMAADNKMLGQFNLEDIPPAPRGMPQIEVTFDIDANGIVSVSAKDKGTGKEQKITIQASGGLSDEDIEKMVKDAEDNAEADKERRELIEARNQAESLIHSTEKSIEDHGDKVDPSTIEAIELAIAALKDDLEGDKANAEKIKSGIQNVTEAAMRLGEAIYKAQAEEGGADEPSAADEDASAGPGDDDIVDAEFEDLDDNKR

SEQ ID NO: 36376 - protein, 390 aa, Silicibacter sp. TM1040
MTKIVIAGAARTPMGGFQGMYDGVSAADLGGAAIKAALERAGATTVDEVLMGCVLPAGQGQAPARQAGFAAGLGEEVPATTLNKMCGSGMKAAMVAYDQIALGHSDVMVAGGMESMTNAPYLLPKMRGGARIGHGQVIDHMFLDGLEDAYDKGRLMGTFAEDCAEHYQFSREEQDAFALGSLSNALAAQESGAFEGEITEVTVKTRKGAVVTDADEQPKSARPDKIPTLKPAFREGGTVTAANSSSISDGAAALVLASETAAAARGLSVRGHILGHASHAQAPGWFTTAPVPAARKLMAQIGWDVEDVDLWEVNEAFAVVPMAFMREMGIPREKVNVNGGACALGHPIGASGARIMVTLLNALEKRGLKRGIAAICIGGGEGTAIAIERA

SEQ ID NO: 36377 - protein, 497 aa, Silicibacter sp. TM1040
MGFAMNAVSILAVMFICLIGVLGLVALIMFLIDRSQTQDAIRRNYPVLGRFRHLFSTLGEFFRQYFFAMDREELPFNRAQREWIARACAGVTNTVAFGSTRNTSVPGTPIFVNAPFPPLDDQFASAEPMLIGPTARVPYNAPSFFNISGMSYGALSRPAITALSRGAREAGVWLNTGEGGLSPFHLDGGCDIVFQIGTAKYGVRDTAGNLSDARLKELAEIPQVKMFELKLAQGAKPGKGGILPAEKVNAEIAEIRGITEGEASISPNRHLDIANYDDLLDIVARIREVTGKPVGIKTVAGSEVALREMFLNFAARPEDVPDCITIDGGEGGTGAAPMPLIDLVGMSVREALPLVCNLRDEYGFKDRIRLISSGKLVNPGDVAWALAAGADFVTSARGFMFSLGCIQALKCNRNTCPTGITTHDPRFQKGLVVEDKYKKVARYAREVIHEVETIAHSVGVDEPRKMRRRHVRIVGEGGASVPMNVDQPSYGSRGSNA

SEQ ID NO: 36378 - protein, 608 aa, Silicibacter sp. TM1040
MDDQNKNLLLATALSFLVILGWYFFFPPPEEAPQPATEVTETAPQGDTTAPAAAPSAGAATAEVDAAAAETEITEDVPRLTIDTPRVEGSISLKGGRIDDLRLKDYRETLDDDSPIVTLLSPAGQPHAYYALYGWAPGAGLGIEDVPTANTLWQAEAGATLTPDTPVTLTWDNGKGLTFSREVSIDEDYMFSITQSVTNSSGASVALAPYGTLARHGEPANLENFFVLHEGVVGMADGELSEIDYDDMTDFDPDPRDGSRAQVNTVTENGWIGFTGHYWMSTLIPAPGEAFRAIAKYDERRDIYQTDVVLPTVTLAAGESTSANTQLFAGAKEWATIREYERAGIEGFLDSIDWGWFFFFTKPIFAVLHWLNAAIGNMGVAIIALTFLLKILVFPLAYKSYASMARMKELQPEMEKLRERAGDDRQKMQKEMMELYKREKVNPAAGCLPILIQIPIFFSLYKVIFVTLELRHAAFFGPFQDLSVPDPTSLFNLFGLLPWAAPAPDSLLSLVFIGILPILLGVSMWVQQKLNPAPTDETQRMIFAWMPWVFMFMLGGFASGLVVYWITNNVITFTQQYLIMRSHGYTPDVFGNIKSGFKKDKAEKAEKK

SEQ ID NO: 36379 - protein, 651 aa, Silicibacter sp. TM1040
MPVFCAKFAYGRDAAARRDWICGFATWLSASRHPPEFQSQRMPHRRVFLSDRSWRRWRQIETIAQSTCRLLLRWQPRLRPAHSPEVAFPQQRGPTTMPLKPPLTELEIKTADSGFYKGFTKDVTITAKILVAALILWAVAFPNQAASVLSHLNGVILASFNYWYIYVVAFFVVVSLGLAIWPASGRLRLGAEHEKPEFSAFSWFSMMFGAGMGIGVLTYATGEPIYHFQNNPDVIQGFVEGASAETVRSAYKWSFLHWGLSPWGAYALTGLALAFFAYRRGLPLTIRSALTPLFGDRLSGFAGHAVDVVAVIATVLGVAQTLGFGVEQFVAGLSRIGFGDWLLVTTDEGTQKASVVAIVLSLVIIMGASTLSALSGVGKGIKWLSNINMGLSVFLLSFFLIFGSTVFGLTALVTGIYDYLLAFPAMLFTVWSDKGTETSSALESWQGGWTIFYWAWWIAFAPFVGLFLARISRGRTIREYVFGAMLVPSVMCFVWFALIGGTAIDLELSGIAEGAILGTGLSDQLYATLAVLLSDGLAWVFSVVVAVLLMTYLVTSADSAVLIINTINAAGDEGPKARPHIIFWGVALALVVGALLIIGGLGAIQTAMIIGALPFSVVMALMGVALIKAIILDGLRGRAGLPVTADQLAGE

SEQ ID NO: 36380 - protein, 328 aa, Silicibacter sp. TM1040
MPRERLSVVVTRRLPEPVETRLSELFDVRLRTDDTPMTRTELAAAMKEADVLVPTVTDTIDAGLLGQAGERLRLIANYGAGVDNIDVATARQRGILVSNTPGVLTDDTADMTMALIMAVVRRIPEGLAIMQRGDWEGWSPTAMLGGRLAGRRLGILGMGRIGQAVARRARAFGMQVHYNNRRRLRPEVEEELEATWWESLDQMVARMDVISIHCPSTPSTFHLMNARRLKLLKPDAVIVNTSRGEVIDENALTRGLRAGEIAGCGLDVYEHGTTVNPRLRELPNVVLLPHMGSATIEGRIEMGEKVLLNIKTFEDGHRPPDQVVPAML

SEQ ID NO: 36381 - protein, 572 aa, Silicibacter sp. TM1040
MPMSSNLAPIPELYVSYDSAQKLKVEAADLTSHDLTPRQICDLELLMNGGFNPLKGFLSEEDYNGVVENMRLADGQLWPMPITLDVTEDFAASIEIGQDIALRDQEGVILATMTVTDRWEPNKSREAEKVFGADDEAHPAVNYLHNTAGKIYLGGPVTGIQQPVHYDFRARRDTPNELRAYFRKLGWRKVVAFQTRNPLHRAHQELTFRAAREAQANLLIHPVVGMTKPGDVDHFTRVRCYEAVLDKYPAATTSMSLLNLAMRMAGPREAVWHGIIRKNHGCTHFIVGRDHAGPGKNSAGEDFYGPYDAQDLFRAHQEEIGIEMVDFKHMVYVQERAQYEPADEIADKDDVTILNISGTELRRRLAEGLEIPEWFSFPEVVAELRKTKPPRAQQGFTVFFTGFSGSGKSTIANALMVKLMEMGGRPVTLLDGDIVRKNLSSELGFSKEHRDLNIKRIGYVASEITKNGGIAICAPIAPYAATRRHVREEIEQFGAFVEVHVATTIEECERRDRKGLYKLAREGKIKEFTGISDPYDVPQNPELRVETENVEVDNCAHQVLLKLESMGLINGN

SEQ ID NO: 36382 - protein, 322 aa, Silicibacter sp. TM1040
MAASERRRLLITRPMTAAVEARARAELDVEIRQETTPLSPEEMRQSLGAFDLVMPTLGDAYSADVFAAVPQPRCRLLANFGVGFNHIDAEAARAAGVEVTNTPGAVTDATADIALTLMLMTARRAGEGERLVRSGQWQGWHPTQMLGLHLSGKRLGVVGLGRIGDAIARRAHFGFGMEISYLARSDKETGYPATRASNLIELAASVDMLVVAVPGGAETRHLINADVLAALPSHAHLVNIARGEVVDEAALITALQAGQIAGAGLDVYEFEPKVPAELRAMEQVTLLPHLGTATEEVRSAMGHMALDNCVAFLTGAPLPNPV

SEQ ID NO: 36383 - protein, 524 aa, Silicibacter sp. TM1040
MKIGTPKEIAEGESRVAMTPASAKDLQKLGFECCIEAGAGEAAGFTDAAYAEAGVEVIKTAAGLWKAADIIAKVRAPSETELKRLNKSKTLISFFNPGGNEEGLELAKSKGATVIAMEMVPRISRAQKMDALSSMANIAGYRAVIEAGNNFDRFFTGQITAAGKVPPAKVLVVGAGVAGLAAIGTSTSLGAVTYAFDVRPEVAEQVESMGAEFVYLDFEEEQQDGAATGGYASVSSPEFREAQLAKFRELAPEMDIVITTALIPNREAPKLWLADMVAAMKRGSVIVDLAAERGGNVEGTVKDEKVVTDNGVTIIGYTDFPSRMASQSSSLYATNIRHMMTDLTPEKDGQVVHDMEDDVIRGATVTHAGEITFPPPPPKVQAIAAQKKPEAPKELTAEEKRAAEVAAFKQQTKNQVTLLAVGAALLLAVGLVAPASFMQHFIVFVLSVFVGFQVIWNVSHSLHTPLMAVTNAISSIIILGALMQIGSGSWLVIFLAALSVFMAGINIFGGFLVTRRMLAMFQKS

SEQ ID NO: 36384 - protein, 342 aa, Silicibacter sp. TM1040
MTSPPALARTSAEPENREQSKMALEDAKTQVDQAFTREDLKGLSFENTFGGATSFLRRRYTKDLTHADIAVTGIPFDQAVTNRPGTRLGPRAVREASALQSPDAPYGWDICPASELAIVDYGDLAFDYANVPAFPDTLTDHIRGILATDTASVAIGGDHYVSFPILKAYAEKYGPVSLLHFDAHSDTWADDDFSRVDHGTMFYKAVKSGIIDPATSVQVGIRTTNEDNLGVPTIDAPTVHEIGPVETARRIREVLGDRPVYLTFDIDCLDPAYAPGTGTPVWGGLTSAQAEAILKGLRGINILGGDVVEVSPPFDTTGATAIAGAHVAMSIICLLGWRMTGR

SEQ ID NO: 36385 - protein, 315 aa, Silicibacter sp. TM1040
MSEFNQPISGNDLARFSGPGTFMRLPQATSLEGLDVAVLGVPMDIGTSWRSGTRFGPKQIRAESAMIRPYNMATGAAPFDALNIADIGDLAINTFNLAESLRIIEDSYDAILGSGVLPFAMGGDHSITLPILRAMARRYGPVAVIHVDAHADVNDEMFGERETHGTVFRRAYEEGLLEADKVYQIGLRGTGYGPDDFKEPQSWGFQHFVASELWNRSLHNMGAEIRRDIGGRPVYISYDIDSLDPAFAPGTGTPEIGGLTTMQALELIRAFKGLNVVGCDLVEVSPPYDPSGNTALVAANLIYEMLCILPGRDRA

SEQ ID NO: 36386 - protein, 120 aa, Silicibacter sp. TM1040
MTDAKTRIDETVKANDVVLYMKGTKDMPQCGFSSRVAGVLNYIGVDYTDVNVLADEDIRQGIKDYSDWPTIPQLYIKGEFVGGCDIITEMTLSGELDGMFEQNGISFDKDAADKIREANA

SEQ ID NO: 36387 - protein, 309 aa, Silicibacter sp. TM1040
MSSRHCILVGAPVDSGKRRTGCLMGPDAYRTAGLAQALESLGHTVEDIGNVTPAPHAPDDGTGKLHEPNLTRAWTESLSEAAEAAMARGMPIFLGGDHALALGTVHGVANHAATVGRPLFVLWLDAHSDFHSLESTETGNLHGCPVRYFTNQARFDNFPPVPNPVPPENVCMIGLRSVDTPEREAMEQVGIHRHDMRDIDENGIARPLSAFLEKVAAQNGMLHVSLDVDFLDPSVAPAVGTTVPGGATVREGHLVCEILHDSGLMTSMDLVELNPFLDERGRTAHLMVDLCASAMGRRVFDRPTRSYNT

SEQ ID NO: 36388 - protein, 198 aa, Silicibacter sp. TM1040
MFAVLKTGGKQYKVQAGDMLRVEKLAADAGETVQFNDVLMIGGDAPVVGAPFVSGAAVQAEVVEQIKGDKVIKFVKRRRKHSSKRTVGHRQKLTLVKITEILASGADASGVKAATGKGEAAPAAKAAPKAKAAAPAAAGSDDLTQLTGVGPAAAKKLEAAGLTTFAQIAALSEDDIAGIDAIKIKPEWVEQAKELAQG

SEQ ID NO: 36389 - protein, 348 aa, Silicibacter sp. TM1040
MKFLDLAKVYIRSGAGGNGCVSFRREKFIEYGGPDGGDGGKGGSVWAEAVDGLNTLIDFRYQQHFFAKNGQSGMGRQRSGKDGDEIVLRVPVGTEILDEDEETVLADLTHVGERVLLAKGGNGGFGNLHFKSSTNQAPRRANSGQEGVERTIWLRLKLIADAGLLGLPNAGKSTFLSSTSNARPKIADYPFTTLHPNLGVVGIDNTEFVMADIPGLIEGAHEGRGIGDRFLGHVERCAVLLHLVDGTSETVAEDYRTIINELEAYGGELASKPRVTALNKIDALDDEERAEARAALEAEVGAPVLMMSSVSREGLDLVLRAVRAEIDDDRLRIKQAEASEEEDTPWQP

SEQ ID NO: 36390 - protein, 347 aa, Silicibacter sp. TM1040
MTRVYLDHNATSPLRHDARAAMIAAMDVCGNPSSVHAEGRAAKAVVERARAQIAAAFGADGADIVFTSGSTEGAALALMGRDLHGSALEHDAVRAWIKEDLTVEAQGRVAVLDPQSSCLQLANSETGVIQDLPEGLAVTDATQAFGKLPVAFNWMGATMALISAHKLGGPKGVGAVVLKRGTDLAAQIKGGGQEMGRRSGTENVIGIAGFGAAAEAAAKDLDNGVWDRVAEIRNILEKAVAAQCPGTIFIGNEARRLPNTSCFATPGWKGETQVMQMDLAGFAISAGSACSSGKVRASAVLTAMGFDEKTAQGAIRVSLGADTTETDVLRFAETWCAKQKKHRARSA

SEQ ID NO: 36391 - protein, 251 aa, Silicibacter sp. TM1040
MLEIKNLHVKLEDEDKQILKGVNLTVEAGKVHAIMGPNGSGKSTLSYVLSGKDGYEVTEGSASLLGEELLELEPEERAALGVFLAFQYPVEIPGVGNMTFLRTAVNAQRKARGEEELSATDFLKHVRAQAKELKIDADMLKRPVNVGFSGGEKKRNEILQMAMLEPKMCILDETDSGLDVDAMKLVADGVNALRDEGRGFLVITHYQRLLDHIKPDVVHIMADGRIVKTGGPELALEVENNGYADILSEVA

SEQ ID NO: 36392 - protein, 441 aa, Silicibacter sp. TM1040
MSDTLKHTLLFAFVGLLLVLEGTTNAFGVFSGSWNSALTILNMGLISAIMAIGVNLQWGFAGLFNVGIMGFTALGGLAVVLTSMPPTPGAWQAGGWQILLALVLGAATIAAAIYSYRVMAAGKARTLTLLAILIVGFVVYRAALDPGVEAIESINPALEGNIGGFGLPVLLAWPLGGLLAAGVAWMIGKTALGLRSDYLAIATLGIAEIIIAVLKNEDWLSRGVKNVVGLPRPLPYEVDLQADPAFVNQAAAWGMDATTASTLYVKLGYALMFTVVLLVFLWMAQMALKSPWGRMMRAIRDNEVAANAMGKHVTRRHLQVFILGSAICGVAGAMMTTLDSQLTPGTYNPLRFTFLIWVMVIVGGSGNNFGAVLGGLLVWFLWIKVEPMGVMLIELVTSGMSEDSGLRAHLLESASHMRLFTMGLVLLLVLRFSPRGLIPEK

SEQ ID NO: 36393 - protein, 290 aa, Silicibacter sp. TM1040
MAKIAFLGLGVMGYPMAGHLQKAGHEVTVYNRTTAKAEGWAAATGGRSAPTPREAAQNADFVMACVGNDDDLRSVCLGEDGAFAGMKPGAIFVDHTTVSAEVTAELYARAKDAQLGFVDAPISGGQAGAENGVLSVMCGGDAADYDKAAPVMEAYARICRRIGESGAGQMTKMCNQIAIAGLVQGLSEALHFAEKAGLDGRAVVEVISQGAAGSWQMANRYETMLDDEFEHGFAVDWMRKDLGICLDTADDIGASLPVTALVDQFYKDVQKLGGGRWDTSSLIKRLRALG

SEQ ID NO: 36394 - protein, 537 aa, Silicibacter sp. TM1040
MTQSLRAADILARRLYEAGCRHAFGMPGGEVLTLVDALTRAGITFHLAKHENCAGFMGEGVHHSDGAPAILVATLGPGALNGVNVVANAHQDRVPMLVLTGCVDADEAQTYTHQVLDQQAVFAPITKASFRLNAAAAEVIADKAVAIAGEARQGPVHIDVPISVANAPATPRNTRRAPAGACAPAGATLAQAQDWLHEAKRPLAVVGLDALLPGGPDATRAFLEARQIPFVTSYKAKGILPEDHPLCLGGAGLSPLADRHLLPLIEASDLILGIGYDPIEMRTGWRAAWDATETRVIDITPEANTHYMHQASLPLIADIPATLNALAVAPQPAPPWPNGEIEKAKTALAEAFPRSDDWGPAGVIAECIDTLPADSLLTADSGAHRILLSQMWPCQEPRQLVQSSGLCTMGCAVPLAMGRKLAEPERTVVSFSGDAGFLMVAGELATAAELGLAPIFVVFVDASLALIDLKQRQRQLPNAGVDFGRHDFAAIGRAFGGEGHRVQNRTELRAALEAAQSASTFTVIAAEIDKESYDGRI

SEQ ID NO: 36395 - protein, 759 aa, Silicibacter sp. TM1040
MPDKTSESLRDAALRYHEFPRPGKLEIRATKPLATGNDLARAYSPGVAEACLEIKDDEANAARYTARGNLVAVVSNGSAVLGLGNIGALASKPVMEGKAVLFKNFANIDCFDIELNESDPEKLADIVCALEPTFGAVNLEDIKAPDCFIVEKLCRERMNIPVFHDDQHGTAIVVGAAAKNALHVAGKKFEDIKIVSTGGGAAGIACLNMLLKLGVKRENVWLCDIHGLVYEGREEDMNPHKAAFAQASEKRTLDEVIDGADLFLGLSGPNVLKPEMVTKMAKRPIIFALANPTPEIMPDEARKVAPDAIIATGRSDFPNQVNNVLCFPFIFRGALDVGATEINDEMQIACVEGIAELARTTTSAEAAAAYKGEQLTFGADYLIPKPFDPRLVAVVSSAVARAAMSSGVAKRPIDDLGAYRAKLNQSVFKSALLMKPVFEAARAAARRIVFAEGEDERVLRTAQEMLRETTETPILIGRPEVIEHRCQRLGLSIRPGQDVQIVNPENDPRYRDYWTSYHRIMERRGVTPDLAKAILRTNTTAIGAIMVHRGEADSLICGTFGEYRWHLNYVQQILGGGSYAPHGALSMMILDDGPMFIADTQVRIEPTPEEIAETVIGAARHVRRFGLKPQIALCSQSQFGNIQCDTGERLRAALAILDDKRRDFVYEGEMNIDTALDPELRERIFPNSRLEGAANVLVFAHADAASGVRNILKMRSGGLEVGPILMGMGNRAHIVSPSITARGLLNMAAIAGTPVAHYG

SEQ ID NO: 36396 - protein, 293 aa, Silicibacter sp. TM1040
MAIEIPVPAVAPALPKPFKTQLLKWVGNKQRFAHEIVAHLPKDYGTYFEPFLGAGGVMANLQPHRALGSDIYPPLVEIWQALREDPARLNAWYQSRYDRFMTGDRVATYEAIKARYNDTPNGADFLFLCRACYGGVVRFRRKDGYMSTPCGSHPVMKPHKFAERVEMWRARMKGASFACLDYRSAMAQARAGDVIYCDPPYAHSQTILYGAQAFRLEELFAAIAACKARGVRVALSIDGTKKSGDIYCDIAIPEGLFEREILVNMGQSMLKRFQMSGQRMESEAVRDRLLLTY

SEQ ID NO: 36397 - protein, 68 aa, Silicibacter sp. TM1040
MPTGTVKWFNTTKGYGFIEPEEGGKDVFVHISAVERSGLTGLADNQKVGYELTEGRDGRQMAGDIRPL

SEQ ID NO: 36398 - protein, 400 aa, Silicibacter sp. TM1040
MSVLSATLSRVKPSPTIAVTNKARELKAAGRDVIGLGAGEPDFDTPQSIKDAAVRAIAEGKTKYTAVDGIPELKQTICEKFKRDNGLDYRPEQVTVNSGGKQTLYNALMATLNPGDEVIIPAPYWVSYPDMVLLAGGTPVPVEASLESSFKLTPDQLEAAITDKTKWFIFNSPSNPTGAGYSRAELKALTDVLMRHPHVWVMTDDMYEHLAYDDFEFCTPAQVEPGLYDRTLTCNGVSKAYAMTGWRIGYAAGPETLIAAMRKVQSQSTSNPCSVSQYAALEALTGPQDFLASNNEIFVRRRNLVVSMLSEIDGLTCPVPEGAFYVYPSIAGLIGKTTPKGVTINSDEDFATALLEEADVAVVFGAAFGLSPNFRVSYATSDDALKEACTRIQRFCASLS

SEQ ID NO: 36399 - protein, 68 aa, Silicibacter sp. TM1040
MANGTVKWFNATKGFGFIQPEDGTQDVFLHISAVERAGINRIDDGQKVTFDLENGRDGRTSASNLALA

SEQ ID NO: 36400 - protein, 555 aa, Silicibacter sp. TM1040
MYKYNDFDSAFLAERNRQFRAQVERRIAGALTEDEFKPLRLMNGLYLQLHAYMLRVAIPYGTLNPDQMRALALLAEKWDKGYGHFTTRQNIQYNWPKLKDVPDMLDALAEVNLHAIQTSGNTIRNVTADHFAGAAADEIEDPRPIAELIRQWSTDHPEFQFMGRKFKIAVSGAANDRAVLKAHDLAIKIVKNEDGEVGYQVLVGGGLGRTPMIGKVLNDFVAADDLLPYIESVISVWNQLGRRDNKYKARIKITVHELGLEKIRELTEERFAQVRPTFGGADQALFQDIKRHFAAPEFRSEGTEVFDAAYDSDPVFRAWADTNLAEHKAPGHAIATISIKKHGATPGDATAAQMYAMADIAEEFAYGELRISHEQNVILPHVHKNDLPAIHARLKAADLATANIGLISDIIACPGMDYCALATARSIPVAQEIATRFEDLKLEHDIGHLQIKISGCINACGHHHVGHIGILGLDRAGVENYQITLGGDATETAAIGTRTGPGFAYDEIVPAVERIVETYLEQRESAEEEFLQTYRRVGMEPFKAALYPASEKKVA

SEQ ID NO: 36401 - protein, 600 aa, Silicibacter sp. TM1040
MARGAVQNTASNEERETSRRIGVLKALWPFMRPYRGLIFAALAALTLTAGVSLSLPLAVRRVVDNFRITDAALLNQYFTAAMIMAALLALGTGIRYALVTKLGERVVADIRKAVFDRIIGMSPAFFERIMTGEVLSRITTDTTLIQSVLGSSASIALRNLLIFLGGLVLMLLTSAKLTAMVLLIVPAVIVPILFLGRRLRVISRENQDWIAASSGNAGESLGAVQTVQAFTHEDLSRAHFSEMTETSYEVSKRRIQTRALLTVIVIFLVFSGVVGVLWIGANDVRFGSMSEGALVQFVIYAVMVAGSVAALSEIWSELQRAAGATERLVELLQAEDSVRDPEVAQVLPEPVRGELTFDTVSFTYPSRPDVSALDQVSLTIAPGETVAFVGPSGAGKTTIIQMIQRFYDPQSGEVRLDGVPLQALARDDFRRHIALVPQDPVIFAATARDNIRFGRPDASDAEVEAAAKAAAAHDFIMKLPEGYDAYVGERGVMLSGGQKQRIAIARAILRDAPVLLLDEATSALDAESERLVQAAFEDLSRDRTTIVVAHRLATVKKADRIVVMDQGRIVAVGTHESLVAEGGLYARLARLQFTDGQAQG

SEQ ID NO: 36402 - protein, 570 aa, Silicibacter sp. TM1040
MSSDTAQPASASRRSGGRVLADQLQILGADTIYCVPGESYLELLDGLHAHQESINVVTCRHESGASNMADAYGKLTGKPGICAVTRGPGATNASNGVHTAFQDSTPMILLIGQVGREMVDREAFQEIDYRRMFGQMAKWVAQIDDAARIPEYMARAWKTALSGRPGPVVLALPEDMLTDEVTVADLRVTPPARPAPAAHDIEALSAMIARAKKPMLMVGGPSWSEACADKALAFAERLGLPVTTSFRSQDYVNNGHDNYVGPVGIAPIPNLRKRLREEVDLLITVGPRLGEMTTQGYELIDIPHPQMTFVHVHPGAEELGQVYQPDLAIQSDPELFFDAAEAITLPSQPEGWADWVQQQRADYLAFQTPTEVPGDVNMGHVVRHMSETLPEDTIYTNGAGNYTVWLHRFHQHRAYRTQLAPTSGSMGYGVPAAVAAKLAHPDRTVVAMAGDGCFMMTSQELATAAQHGADVIYVVVNNGMYGTIRMHQERHHPGKVMATKLVNPDFVAYAASFGIAGERVLRTEDFPAALERARTTKGGYMIEIVVDPEALTPNQSLSAVRAEGQGKANA

SEQ ID NO: 36403 - protein, 412 aa, Silicibacter sp. TM1040
MPLLVMKFGGTSVANLDRIRRAAKRVGVEVAKGYDVIVIVSAMSGKTNELVGWVGETSPLYDAREYDAVVSSGENVTAGLMALTLQEMDVPARSWQGWQVPLKTNSAHSQARIEEIGTENINQKFGEGMKVAVVAGFQGISPEGRITTLGRGGSDTTAVAFAAAFGAERCDIYTDVDGVYTTDPRICEKARKLDKIAFEEMLELASLGAKVLQTRSVELAMRYKVKLRVLSSFEEQSDEAGTLVCDEEEIMESNVVNGVAYSRDEAKLTCLSVADRPGIAATIFGCLSDAGVNVDMIVQNISEDGRTDMTFSCPTDQVQRAEMALNAYKEKGELNFAELVADTGVAKISVVGIGMRSQSGVAAKMFKVLSDEGINIKVITTSEIKISVLVDRKYMELAVQALHDAFELDKAS

SEQ ID NO: 36404 - protein, 325 aa, Silicibacter sp. TM1040
MKIGFIGLGNVGGKLAGSLLRNGFDLTVYDLNPDLVAEYVEKGAQPGTGPLAIMRACDAVITCLPSPAACATVVEEMLPAVDSSKIWMEMSTTDAAEVKRLAALVSERGGSAMECPVSGGCHRADTGNISIFAGCDRATFERMLPTLTTLGRRVLHTGDIGSASILKVMTNYLATANLLTCCEALVTMKAAGIDLNTTYEAMKISSGTSFVHETESQVILNGSRDISFTMDLVKKDISLFQTIADAHGVPLEISPLLVEIFTDGIARFGERELSPNIIRRLEEATGLSITAPGFPAEMVDDEPEEPGYEVVPTGLSAPLAKAPAG

SEQ ID NO: 36405 - protein, 340 aa, Silicibacter sp. TM1040
MPTLNEPKLISGNANLPLAKSISRRMSMHRGVDQDLVNARVERFNDGEIFVEVYENVRGEDMFIIQPTSNPANDNLMELLIIADALRRSSAQRITAVIPYFGYARQDRRTKARTPISAKMVANMLTGAGIERVLTMDLHAAQIQGFFDIPVDNLYASPIFALDVKAQFKDQMDDLMVVSPDVGGVARARELAKRINAPLSIVDKRREKAGEIAEMTVIGDVKDKICLIVDDICDTAGTLCKAAQILLDNGAKEVHAYISHGVMSGPAVERVTNSVMKSLVLTDSIQPTQPILDAPNIRIVPTAPLFTQAILNIWHGTSVSSLFEDKTLIPIYESLYNSQS

SEQ ID NO: 36406 - protein, 549 aa, Silicibacter sp. TM1040
MTDQTTETPDGIPSPDGAAHIIDTDYEIGQDNVEGSVGPFGFDIHNPVFAISGIAVVAFVFYTLALPEQAGNVFSWLFSAVTKGFDWFFLGAANIFVIFCLFLIVTPFGNVRLGGTEAEPDYSYIGWFAMLFAAGMGIGLMFYGVSEPLSHFASSIGGTASEGGVRTDWAPLGAAGGNEAEAVRLGMAATIFHWGLHPWAIYAVVALALALFSYNKGLPLTIRSAFYPIFGDAVWGWVGHVIDILAVFATLFGLATSLGFGATQANAGLNELFGISIGSTTEVILISAITAIALVSVLRGLDGGVKILSEINMGLAFVLLVFVLLVGPTVFLLSLFWDSLMAYFQYLPALSNPVGREDVNFMQGWTSFYWAWWISWSPFVGMFIARVSRGRTVREFIICVLLIPSMVCVLWMSVFGGTAIHQVLSDGYTVAQDAALELKLFKMLDVMPLAGITSLVGIVLVIVFFVTSSDSGSLVIDTITAGGKVDAPVPQRAFWCVFEGAVAIVLLLSAGGLQSLQSMVISTGLPFTVVLLVMCYAILRGLMSERKAT

SEQ ID NO: 36407 - protein, 904 aa, Silicibacter sp. TM1040
MSDLDASWILVCALLVLLLQAGFLCLEAGTVRAKNSANVALKNLSDVCIVSTCFWLVGFGLMFGESFNGLFGTTQFWLALDNDSGHAASIFLFQMAFAASAATIVSGAVAERERFLGYMVVSVALSALVYPVVGHWIWNQAGWLRQMGFVDFAGATVVHSVGGWTALVTIIILGPRLGRYGPKKRRFDEYSISLVTLGGLLLWVGWGAFNGGSAMAFGTGVGPIIARTMLLAAGAGVASIAIGLGLFRHVRAELLVNGFLGGLVAGTAGVHLMTGTVAFGIGALGAVTVIIARDILDALKIDDVVGAVPVHLAAGLIGTLSIAFTAPVDLLPAGSRLAQLGIQALGITAVGGWVVCSMAPLILLLRARGLLRVHPKDEVRGLNLTENNQRNALMDLLAEMKRHQRSGSFSRRVRIDRSTEYGVLAYRYNRVLDRVEAEINARVDSIRKERMSRLLAEEAFESMREAQEENAWSARHDKLTGLGNRKYLEEVAVETSTGPLGATLLIAIDLDRFKEINDTYGHEAGDVVLEHTAQRLSEKIRTGRDFAFRIGGDEFVVLMEFAGTQDDAFEYCSDLLFELLQPVRYKATDLQVGASIGFALCKPPETLGAALRRADLALYASKADGRSCVNAYSASIGSAHDEKMNLIRDFKQAFANNEIEVTLQPQIDGKTMEIAGCEALARWHHPVRGIVSPDVFVPVAKEVNMLADLDRRILDLALAAYWNFASHGIALPSLSVNVSAERLGHPDLIKELQQREDLPPDGLAFELLETVFLDQLTENYANQIAALKAMGIAIEIDDFGTGHASIAGVLALKPDRLKIDRMFTSGIDEKPARRDLMRGLIEMAASAGAETVVEGVETEAQAQVLSELGADVLQGFAFARPMDQERFLLWAQDWNAARQMPKTG

SEQ ID NO: 36408 - protein, 637 aa, Silicibacter sp. TM1040
MGNARNIAFWVVLFLLVVTLFNLFSGSGSTLQSREKTYSEFVTAVEGGNVSTVTLDGEQVRYTTSDGQSYTTIKPGDAEVTQMLIDNNIPVRAEKQQQSTFQSFLLTLLPFLLLIGVWIYFMNRMQGGGKGGAMGFGKSKAKMLTEKHGRVTFDDVAGIDEAKEELEEIVEFLRNPQKFSRLGGKIPKGALLVGPPGTGKTLLARAIAGEAGVPFFTISGSDFVEMFVGVGASRVRDMFEQAKKNAPCIVFIDEIDAVGRHRGAGYGGGNDEREQTLNQLLVEMDGFEANEGVIILAATNRKDVLDPALLRPGRFDRNVTVGNPDIKGREKILGVHARKTPLGADVDLRIIARGTPGFSGADLANLVNEAALMAARVGRRFVTMEDFENAKDKVMMGAERRSMVLTADQKEKTAYHEAGHAVVGLKLPECDPVYKATIIPRGGALGMVVSLPEMDRLNWHKDECEQKLAMTMAGKAAEIIKYGPGHVSNGPAGDIQQASQLARAMVLRWGMSDKVGNIDYAEAHEGYSGNTAGFSVSANTKELIEEEVRRFIEEAYQRAYQILEENKDEWERLAQGLLEYETLTGEEIKRVMNGEPPQADDDADDDADTGATSVTAIPKAKSKKTPPEGDMEPEPSS

SEQ ID NO: 36409 - protein, 217 aa, Silicibacter sp. TM1040
MKFFVDTAEIDAIAELNDLGMVDGVTTNPSLIKKSGRDIIEVTKEICDLVDGPVSAEVTATDAETMIAEGRKLLEIADNITVKVPLTWDGLKACKTLTDDGHKVNVTLCFSANQALLAAKAGATFISPFIGRLDDVNLDGMDLIEDIRTVYDNYGFETEILAASIRTVNHILDSARIGADVITAPPAVIKSMVNHPLTDKGLDAFLADIKAAGIKIL

SEQ ID NO: 36410 - protein, 301 aa, Silicibacter sp. TM1040
MTTRAGFIALIGEPNAGKSTLLNRMVGAKVSIVTHKVQTTRARIRGVAMEGDSQLVFVDTPGLFQPRRRLDRAMVAAAWGGAADADVIVMLIEAHRGVTEGVERILENLGEVAEGRRVALAINKIDKVQSDVLLGLTKDLNDRFPFAETFMISAEKGYGTEDLRQWLAAEVPEGPWLYPEDQIADLPLRMIAAEMTREKLTLRLHQELPYQLTVETEKWEERKDGSARIDQVVYVVRDGHKGIVLGKRGETIKAVGQAARAELEEFLDRKIHLFLQVKVRPNWLEESERYSEMGLEFKDGN

SEQ ID NO: 36411 - protein, 440 aa, Silicibacter sp. TM1040
MKKLTVTLAATALATLPGLAFAQEAAAETPDINPYIFTTLLFLIGGFLVFWMAAGFAMLEAGLVRSKNVTMQLTKNVALFSIAAIMYWLVGFNLMYPGDGWIIPGVMGPLFATTSLEPVGLGADAAALDYASVGSDFFFQLMFCATTASIVSGTLAERIKLWPFLIFVAILTGVIYPIEASWVWGEGFLDGLGFSDFAGSTLVHAAGGFAALAGALILGPRIGKYKDGRTIPMPGSNLALATLGTFILWLGWFGFNGGSQLAMGTVGDVTDVSRIFANTNMAAAAGAVTALILTQLLFKKPDLTMILNGALAGLVSITAGPLDPTLFGALLIGAVGGVIVVFTVPMLDKMKIDDVVGAIPVHLLAGLWGTFAVPFYTEGTSFITQIVGFATIGIFTFVVSGVVWMILKATMGIRVSEEDEINGLDMAELGMEAYPEFKGS

SEQ ID NO: 36412 - protein, 1510 aa, Silicibacter sp. TM1040
MTKYDENWVRAEEAKRKWMAENGLYAEEEEHSSCGVGLVVSVDGSKSRKVVDAGIDALKAIWHRGAVDADGKTGDGAGIHVQIPVPFFWDQVKRTGHNPREDELLAVGQVFLPRTDFGAQETCRTIVETEVLRMGYYIYGWRHVPVDVTCLGEKANATRPEIEQILISNSKGVDEETFERELYVIRRRIEKAAAAAQVGGLYIASLSCRSIIYKGMMLAEQVAVFYPDLMDERFESAFAIYHQRYSTNTFPQWWLAQPFRMLAHNGEINTLKGNVNWMKSHEIRMASSTFGDHAEDIKPIVASGSSDSAALDSVFEVLVRAGRSAPMAKTMLVPESWSKQAEELPQAWRDMYSYCNAVMEPWDGPAALAMTDGRWVCAGLDRNGLRPMRYVVTGDGLVIAGSEAGMVPIDEASVVEKGALGPGQMLAVDMAKGQLYHDVEIKDKLARALPFGEWVEKVTDLDEVLGGVQETPLFSGEELRRRQVAAGYTIEELEQILAPMAEDGKESLASMGDDTPSAVLSKQYRPLSHFFRQNFSQVTNPPIDSLREFRVMSLKTRFGNLKNVLDEDSSQTEIVVLESPFVGNSQWDKLVENLGSKLAEIDCSFAPGRGALNAALARIRAEAEEAVRSGAGHIVLTDQHSGADKVAMPMILATSAVHSHLTRQGLRTFCSLNVRSAECIDPHYFAVLIGCGATVVNAYLAEDSLADRIERGLLDGSLTENVARYREAIDQGLLKIMAKMGISVISSYRGGLNFEAVGLSRAMVAEYFPGMTSRISGIGVHGIQVKAEEIHAKGWNTQENVLPIGGFYKARKSGETHAWEATSMHMMQMACNKASFELWKQYSAKMQSNPPIHLRDLLDIKPLGKPVPLEEVESITAIRKRFVTPGMSLGALSPEAHKTLNVAMNRIGAKSDSGEGGEDPAHFVPEPNGDNPSAKIKQVASGRFGVTAEYLNQCEELEIKVAQGAKPGEGGQLPGMKVTDLIARLRHSTKGVTLISPPPHHDIYSIEDLAQLIYDLKQINPRCKVTVKLVASSGVGTIAAGVAKAKADIILISGHNGGTGASPATSIKYCGLPWEMGLTEAHQVLAMNNLRDRVTLRTDGGLRTGRDIVMAAMMGAEEYGIGTAALIAMGCIMVRQCQSNTCPVGVCTQDEALRGKFTGNADKVVNLITFYAQEVREILASIGARSLDEVIGRADLLAQVSRGSAHLDDLDLNPLLITVDGSASIVYNRDKDRNAVPDTLDAEIVRDAARFLKDGEKMQLSYAVQNTHRTVGTRTSSHIVQNFGMRNTLQPDHLTVKLQGSAGQSLGAFAAPGLKLEVSGDANDYVGKGLSGGTIVVRPPMASPLNAAENTIVGNTVLYGATDGYLFAAGRAGERFAVRNSGAKVVIEGCGTNGCEYMTGGVAVILGSIGANFGAGMTGGMAYLYDPDGNAETLMNMESIVTCPVTVDHWEAQLKDLIERHVAETGSRKAAEILQHWDSEKTHFLQVCPKEMLNKLPHPISVETSAIPAE

SEQ ID NO: 36413 - protein, 751 aa, Silicibacter sp. TM1040
MPKAKITDEEALAFHLEPSPGKWEVTATVPMTTQRDLSLAYSPGVAVPCEAIAENPETAYDYTNKGNLVAVISNGTAVLGLGNLGALGSKPVMEGKSVLFKRFADVNSIDIELDTEDPDEFIKAVRLMGPTFGGINLEDIKAPECFIIEQKLKEEMDIPVFHDDQHGTAVICAAGLINALHLSGKKIEDVRIVLNGAGAAGIACIELLKSMGARHENCIVCDTKGVIYQGRTEGMNQWKSAHAVKTELRSLEEAMNGADVFLGVSVKGAVTQDMVKSMADNPVIFAMANPDPEITPEEAHEVRVDAIVATGRSDYPNQVNNVLGFPYLFRGALDIHARAINDEMKIACAHALARLAREDVPDEVALAYGKSLSFGRDYIIPTPFDPRLIHRIPPAVAKAGMDTGVARRPIIDMDAYEHGLRGRMDPTQSILRGLNARARAAQSRMIFAEGDDPRVLRAAVTYQRSGFGKALVVGRQDDVKAKLEEAGLGDAVRELEVVNAANTHHFETYKDFLYERLNRKGFDRKDIHRLVGRDRHVFSALMLAHGHGDGLVSGATRKSAHVLDRINHVFDADAEHGAAGVTALLHKGRIVLIGDTLVHEWPDENDLATIAERAAGVARHMGLDPRVAFVSFSTFGYPVSERAEKMHIAPTVLDKRGVDFEYEGEMTVDVALNAKAQEHYPFQRLSGPANILVVPARHSASISVKLMQEMGGATVVGPILSGVDKPIQICSTTSTANDVLNMAVLAACNIG

SEQ ID NO: 36414 - protein, 407 aa, Silicibacter sp. TM1040
MSAPKKVVLAYSGGLDTSIILKWLQTEYGCEVVTFTADLGQGEELEPARKKAELLGIKPENIFIEDIREEFVRDFVFPMFRANAVYEGLYLLGTSIARPLISKRLVEIAEATGADAVSHGATGKGNDQVRFELSAYALNPDIKVIAPWREWDLTSRTKLLEFAEANQIPIAKDKRGEAPFSVDANLLHTSSEGKVLEDPAEMAPDYVYQRTVNPEDAPNEPEFIEITFEKGDAVAINGEAMSPATILTKLNEYGRKHGIGRLDFVENRFVGMKSRGIYEAPGGDILLEAHRGIEQITLDSGAGHLKDSIMPRYAELIYNGFWYSPEREMLQALIDESQKHVTGTVRVKLYKGSAKTVGRWSEHSLYSEAHVTFEEDAGAYDQKDAQGFIQLNALRLKLLAARNRRVK

SEQ ID NO: 36415 - protein, 199 aa, Silicibacter sp. TM1040
MSALAETIAKALTRARTETSDFDLNPETVLPAGRKLRPAGVLVGIETYGAVPQVVLTKRSSVLKHHPGQIAFPGGKVDPTDNDATAAALREAWEEIALPRELPRILGHLPCHETVTGFQVTPVVAVIDQPFEARAEAGEVAEVFRVPLSHVLDIERYQIQSRRWRGTKRFYFAVPFGPYYIWGATARMLRGFAAIMDTR

SEQ ID NO: 36416 - protein, 531 aa, Silicibacter sp. TM1040
MAPKVLISDKLSDAAVQIFRDRGIDVDFLPDVGKDKEKLAEIIGQYDGLAIRSATKVTPTILENATNLKVIGRAGIGTDNIDKEAASKKGVIVMNTPFGNMITTAEHAIAMMFAVARQVPEASASTHAGKWEKSKFMGVELTGKTLGVIGAGNIGGIVCDRARGLKMKVVAYDPFLSEEKAKKMQVEKVELDELLARADFITLHVPLTEQTKNILSRENISKTKKGVRIINCARGGLVDEEALAEALTSGHVAGAAFDVFSVEPAKENPLFNLPNVVCTPHLGAATTEAQENVALQVADQMANYLLTGAVENALNMPSVTAEEAKIMGPWIKLADHLGAFAGQMTDEPITAINVLYDGVAADMNLDALNCSVVAGIMKKVNPDVNMVSAPVVAKERGIQISTTNQDKSGSFDGYIKVTVVTAKRERSVAGTVFSDGKPRFIQIKGINIDAEVGAHMLYTTNQDVPGIIGTLGQTLGDMDVNIANFTLGRNEVGGEAIALLYVDAEVPADARAKLAETGYFTQIKPLAFDVA

SEQ ID NO: 36417 - protein, 391 aa, Silicibacter sp. TM1040
MTDIVILDGARTAIGTFGGALAQTAPIDLGATVAKAAMERSGVDPAQIGTVVYGHVINTEPRDMYLSRVAAMQAGIPESTPAMNVNRLCGSGAQAIVSGIQALMLGDAEYALTGGAESMSRSPFITPSTRWGQKMGDVKSLDMMLGALNCPFGTGHMGVTAENVADEHEITRAQMDEFALVSQTRAAAAIEAGYFQSQIVPVDVKVKRDMVPFEVDEHPKGTSMEALSGLRPVFKKDGRVTAGNASGINDGAAALVLATAEAAEKSGLKPKARILGYAHAGVRPEVMGVGPIPAVEQLLKRIDMTVGDFDLIESNEAFAAQALAVNKALGLDSAKVNPNGGAIALGHPVGATGAIITVKALYELERTGGRRAIITMCIGGGQGIALAIERI

SEQ ID NO: 36418 - protein, 562 aa, Neisseria meningitidis serogroup A
MLNKDQFADNHFIRTIIEDDLKSGKHEAVQTRFPPEPNGYLHIGHAKSICLNFGLAYIYDGLCNLRFDDTNPEKENDEYVNAIKEDVEWLGFHWAGEPRFASNYFDQLYDYAVGLIKDGKAYVDDLTPEEMREYRGTLTEAGKNSPYRDRSVEENLDLFTRMKNGEFPDGSKTLRLKIDMASGNINMRDPVIYRIRRAHHHNTGDKWCIYPMYDYTHCISDAIEGITHSLCTLEFEAHRPLYDWVLDNIHAPHATRPRQYEFSRLELLYTITSKRKLNQLVVEKHVSGWDDPRMPTISGMRRRGYTPEGLRLFAKRAGISKSENIVDMSVLEGAIREELENSAPRLMAVLNPLKVTLTNFEAGRTQSRRAAFHPNHEEMGEREVPISQTIYIEADDFAENPPKGFKRLIPGGEVRLRHGYVIKCDEVVKDEAGNVVELKCSIDHDTLGKNPEGRKVKGVIHWVSAEHAAEIKVRLYDRLFTIERPDAVRGEDGEYLPFTDFLNPESVKEITAYAEPAAKDLPAESRWQFERIGYFVTDRKDHGKDTPVFNRTVTLKDSWQPK

SEQ ID NO: 36419 - protein, 244 aa, Impatiens hawkeri
  misc_feature (198)..(198): Xaa can be any naturally occurring amino acid
  unsure (1)..(244): unsure at all Xaa locations
MGRGRVELKRIENKINRQVTFAKRRNGLLKKAYELSVLCDAEVALIIFSNRGKLYEFCSSPSMLKTLERYQKCNYGAPEANISSRGALELSGQQEYLKLKQRYETLQRTQRNLLGEDLGPLDGKELDTIERQLDTSLKHIRSTRTQHMVDQLEDLQRKEQILNEANRALKQRLLESSFNWMQNGQHVDYSGPAVQPNXDELFHPLECEPTLQMAMGYQTHHDPTSVEAAGAGPSMNNYFPGWLS

SEQ ID NO: 36420 - protein, 286 aa, Solanum lycopersicum
MSSEKEDGLGLSLSLGIMSCPQNNHKTTPSLPLNLLPFMHHHQVSSGRKDEGGERVRGGIDMNEPARMIIECDDEEDEEEDQVLMVSSPNSTVSSVSGKRSHDREENEGERATSSLEDDGGDAAARKKLRLSKEQAAVLEETFKEHNTLNPKQKLALSKQLNLRPRQVEVWFQNRRARTKLKQTEVDCEYLKRCCENLTDENRRLQKEVSELRALKLSPQFYMNMSPPTTLTMCPQCERVAVSSSSSSSSVVNATRAQNHQAPVPMNKPWAAMFASKTLDVQRSQM

SEQ ID NO: 36421 - protein, 325 aa, Mercurialis annua
RVLSSSATISVAHPGIGWGGNGAFGLFPAFYEFSCPQANDIVMSVLQEAISREPRMAASLLRLHFHDCFVQGCDASVLLDDSATVVSEKNSGPNKNSLRGFDVIDEMKNKLEEVCPQTVSCADILALAARGSTLLSGGPNWELPLGRRDSKTASLSGSNKLIPPPNSTIGNLIAFFKRQGLNVVDLVALSGAHTIGVARCVTFKQRLYNQNGNNEPDETLEKTYYRGLKSACPKSGGDNNISPLDFGSPVRFDNTYFKLILWGKGLLTSDEVLYTGTPTDYDLVKTYAEDEQLFFDQFAKSMIKMSNIRPLTGYSGEVRRLCSVN

SEQ ID NO: 36422 - protein, 561 aa, Schizosaccharomyces pombe
VNELLEAVKKEFEDICQKTKTVEAQKDDFEYKAMISAQINEMALMKQTVMDLEMQQSKVKDRYEEEITSLKAQLEARRKEIASGVVPQSSKTKHGRNSVSFGKYGNAGPFNSDNSSKPLILNNGSSGGTPKNLRSPAIDSDGTVLAPIQTSNVDLGSQYYSSPHVRPAVGATMAGSAMRTFPSNLPLGHPPPPSDSANSSVTPIAAPLVVNGKVSGNPPYPAEIIPTSNVPNREEKDWTVTSNVPNKEPPISVQLLHTLEHTSVICYVRFSADGKFLATGCNRAAMVFNVETGKLITLLQEESSKREGDLYVRSVAFSPDGKYLATGVEDQQIRIWDIAQKRVYRLLTGHEQEIYSLDFSKDGKTLVSGSGDRTVCLWDVEAGEQKLILHTDDGVTTVMFSPDGQFIAAGSLDKVIRIWTSSGTLVEQLHGHEESVYSVAFSPDGKYLVSGSLDNTIKLWELQCVSNVAPSMYKEGGICKQTFTGHKDFILSVTVSPDGKWIISGSKDRTIQFWSPDSPHSQLTLQGHNNSVISVAVSPNGHCFATGSGDLRARIWSYEDL

SEQ ID NO: 36423 - protein, 582 aa, Streptomyces verticillus
MSSLAVRVGARVRSVLPTRADLAGMGRSPRRDLLAGLTVAIVALPLALGFGVSSGLGAEAGLATAVVAGALAAVFGGSNLQVSGPTGAMTVVLVPIVARYGPGGVLTVGLLAGLMLIALALARAGRYMQYVPAPVVEGFTLGIACVIGLQQVPNALGVAKPEGDKVLVVTWRAVETFAGAPNWTAAGLAAAVAAVMLTGARWRPVVPFSLLAVTGATVVAQLCHLDAARPIGDLPAGLPAPSLAFLDLGALGSLLAPAVAVAALAALESLLSASVADGMTVGQKHDPDKELFGQGLANLAAPLFGGVPATGAIARTAVNVRTGASSRLAALTHAAILAVIVFAAAPLVSRIPLAALAGVLIATAIRMVEVGSLRAMARATRSDGLVLILTAVATVALDLVYAVIIGLLVAGALALRAVAKQVRLDQVSLKEDLTGDHSAEEHALLAEHIVAYRIDGPLFFAAAHRFLLELSDVADVRVVILRMSRVTTMDATGALVLKDAVTKLNRRGITVLASGVRPGQRRVLDSVGALGLLRAATGDDYTGTPEAIAAARSHLHGAGVLAPACPGPPPPVPPPCAPSARR

SEQ ID NO: 36424 - protein, 638 aa, Streptomyces verticillus
MRPVCGIVAIRSADGGLDGGELTAPMADLRPRGPDGEGTWVSPTGRAALGHTRLAVIAPDAGRQPVAGPDGTVRLVVNGEFYGYREIRAELRAAGCRFRTGSDSEIALHLYLRDGRRALERLRGEFAFVLWDERRATLFAARDRFGVKPLYYTERDGRLYVASTVRALLSCGAPARWDTAAFAAHLQLGLPPDRTLFAGIRQLPPGCHLIADAHGTRVTPYWDLDYPPAGELAARGSLDDHLDAVRERTDEAVRLRTVADVPLACHLSGGLDSSAVAASAARHTRLTAFTVRFDDPAFDESAVARRTAAHLAIDHREVASERAHFADHLRDVVRAGEMVQENSHGIARYLHSAHIKKAGFTAVLAGEGGDELFLGYPQFRKDLTLSLSADARDKADRGYARLVAAGLLPPYLRTLLGTLGFLPSWIVDRHLAVTQPVAALLRPDFAAELARADAAAPLLAAGAGLLAGRAPAHQATYLFAKTWLPGYLLAAERLDAAQAVEVRLPLFDHHLFDLVRHTPPAWYDKDGTGKYPLRAAMRHRLPREVTEGRKQGFLAPPMADDDTLLDALRERLAGPGAGDDPFFDPHAVRALLDRLAAAPPGQRSGGEKLLQLVASTAELADEFGLTTAPSGQKGGNGG

SEQ ID NO: 36425 - protein, 813 aa, Enterococcus faecium
MKEVVMIDAARTPIGKYRGSLSPFTAVELGTLVTKGLLDKTKLKKDKIDQVIFGNVLQAGNGQNVARQIALNSGLPVDVPAMTINEVCGSGMKAVILARQLIQLGEAELVIAGGTESMSQAPMLKPYQSETNEYGEPISSMVNDGLTDAFSNAHMGLTAEKVATQFSVSREEQDRYALSSQLKAAHAVEAGVFSEEIIPVKISDEDVLSEDEAVRGNSTLEKLGTLRTVFSEEGTVTAGNASPLNDGASVVILASKEYAENNNLPYLATIKEVAEVGIDPSIMGIAPIKAIQKLTDRSGMNLSTIDLFEINEAFAASSIVVSQELQLDEEKVNIYGGAIALGHPIGASGARILTTLAYGLLREQKRYGIASLCIGGGLGLAVLLEANMEQTHKDVQKKKFYQLTPSERRSQLIEKNVLTQETALIFQEQTLSEELSDHMIENQVSEVEIPMGIAQNFQINGKKKWIPMATEEPSVIAAASNGAKICGNICAETPQRLMRGQIVLSGKSEYQAVINAVNHRKEELILCANESYPSIVKRGGGVQDISTREFMGSFHAYLSIDFLVDVKDAMGANMINSILESVANKLREWFPEEEILFSILSNFATESLASACCEIPFERLGRNKEIGEQIAKKIQQAGEYAKLDPYRAATHNKGIMNGIEAVVAATGNDTRAVSASIHAYAARNGLYQGLTDWQIKGDKLVGKLTVPLAVATVGGASNILPKAKASLAMLDIDSAKELAQVIAAVGLAQNLAALRALVTEGIQKGHMGLQARSLAISIGAIGEEIEQVAKKLREAEKMNQQTAIQILEKIREK

SEQ ID NO: 36426 - protein, 460 aa, Absidia zychae
MFGKRALTSLLVTLGVALVCAPVTVQAHPMSHVLRRQDGNDTSSGNTTQLKYTSPKLCDPDVKQYSGYLDAANDEHYFFWFFESKNDPKNDPLTIWLNGGPGCSSLIGLWEELGPCQQNGSANPHSWHHSSNMLFFDQPDGVGFSYGKQTVSTTEDAAERAWTFLQAFYETFPQYSKLDVHYFGESYGGHYIPGFASHVVDMNKKVQSGEEKGVVVPLKSIGVGNGFIDAVIQYKSYPKMTCHSTYPAVLSEEECDKMQQIYENDCKPAAEQCAESDEDSDCVNANQQCGQIEGIYAQSGYSFYDIRQQGDDTPHPFVDELNKASVIKEVGARGHFSMCSDSVGTAFAQTGDGARSYIPAVEKLLKEGIPVLIYVGDADVICNWYGNLDVADSLKWDGSDAFSKTKLEAWKADGKEVGQFRSADKLTFVRVYEAGHEVPMYQPEAALSMFQTWISGKSFG

SEQ ID NO: 36427 - protein, 337 aa, Microcystis aeruginosa
MTTTSPKTLTMDIQKPRVLLIGKMYDEAGQKLLEESTNIEILSNPTLEEINEAIQEVSGVFVRYPNKLEASSIRLAKQLKVISTSGFGTDSIDIMAATEQGVIVVNNPGMSTTSVAEHTLSMILALAKKLPFLDHCVKKGNYLIRNQMQPIQLENKTLGIVGLGRIGTLVAHKCNLALGMRVLAYDPYVPASKAETVGATWVKDLDVLLAESDFVSLHTELTSETREMFNISVFKKMKPTAFLINTSRGKVVCEKDLGIALNQKLIAGCALDVFEPEPPALDNPLYNFENVILSPHLAGVTPEASLAAAVSAANQILQVLQGEKPPYMINPEVWNLF

SEQ ID NO: 36428 - protein, 62 aa, Yersinia enterocolitica
MSNKMTGLVKWFDAGKGFGFISPADGSKDVFVHFSAIQGNDYKTLDEGQNVEFSIEQGQKGP

SEQ ID NO: 36429 - protein, 544 aa, Arabidopsis thaliana
MASLQLYGVKTPGLALSSKRLEFASKGACFSVTLPSSSAVFRDVEHSCRNIGLRVSCEALRVDLLQRKEPETCDSSGTGKELTCVMKFGGSSVGSAERMKEVANLIFSFPDERPVIVLSAMGKTINKLLKAGEKAVTCGVTNVESIEELSFIKELHLRTAHELGVETTVIEKHLEGLHQLLKGISMMKELTLRTRDYLVSFGECMSTRLFSAYLNKIGHKARQYDAFEIGFITTDDFTNADILEATYPAVSKTLVGDWSKENAVPVVTGYLGKGWRSCAITTLGRGGSDLTATTIGKALGLREIQVWKDVDGVLTCDPNIYPGAQSVPYLTFDEAAELAYFGAQVLHPLSMRPARDGDIPVRVKNSYNPTAPGTVITRSRDMSKAVLTSIVLKRNVTMLDIASTRMLGQYGFLAKVFTTFEDLGISVDVVATSEVSISLTLDPAKLWGRELIQRVNELDNLVEELEKIAVVKLLQRRSIISLIGNVQKSSLILEKVFQVFRSNGVNVQMISQGASKVNISLIVNDEEAEQCVRALHSAFFETDP

SEQ ID NO: 36430 - protein, 66 aa, Lactobacillus plantarum
MEHGTVKWFNADKGFGFITRENGSDVFVHFSAIQEDGFKSLDEGQAVNFDVEESDRGPPAANVTKA

SEQ ID NO: 36431 - protein, 582 aa, Lotus japonicus
MSSSFSIRFLAPPFPSTSRPKSCLSAATPAVAPTDAAVSRLEPRVEERNGYWVLKEEHRGGINPQEKVKLEKEPMALFMEGGIDELAKVSIEELDSSKLTKDDVDVRLKWLGLFHRRKHQYGRFMMRLKLPNGVTTSAQTRYLASVIRKYGKDGCADVTTRQNWQIRGVVLPDVPEILKGLAEVGLTSLQSGMDNVRNPVGNPLAGIDPDEIVDTRPYTNLLSHFITANSRGNPTVSNLPRKWNVCVVGSHDLFEHPHINDLAYMPANKDGRFGFNLLVGGFFSPKRCAEAIPLDAWVSAEDVIPVCKAILEMYRDLGTRGNRQKTRMMWLIDELGIEVFRSEVEKRMPLGQQLERASQEDLVQKQWERRDYFGANPQKQEGLSYVGIHIPVGRIQADEMDELARLADEYGTGELRLTVEQNIIIPNVENSKLSALLNEPLLKEKFSPEPSLLMKTLVACTGSQFCGQAIIETKARALKVTEEVERLVAVTRPVRMHWTGCPNTCGQVQVADIGFMGCMARDENGKPGEGVDIFLGGRIGSDSHLAEVYKKAVPCKDLVPIVADILVKHFGAVQRNREEGDD

SEQ ID NO: 36432 - protein, 374 aa, Arabidopsis thaliana
STLLSDEVLLNLTDATGKDRIIAEYIWIGGSGMDIRSKARTLPGPVTDPSKLPKWNYDGSSTGQAAGEDSEVILYPQAIFKDPFRKGNNILVMCDAYTPAGDPIPTNKRHNAAKIFSHPDVAKEEPWYGIEQEYTLMQKDVNWPIGWPVGGYPGPQGPYYCGVGADKAIGRDIVDAHYKACLYAGIGISGINGEVMPGQWEFQVGPVEGISSGDQVWVARYLLERITEISGVIVSFDPKPVPGDWNGAGAHCNYSTKTMRNDGGLEVIKKAIGKLQLKHKEHIAAYGEGNERRLTGKHETADINTFSWGVANRGASVRVGRDTEKEGKGYFEDRRPASNMDPYVVTSMIAETTILGEPTLEAEALAAQKLSLNV

SEQ ID NO: 36433 - protein, 609 aa, Streptomyces aureofaciens
MCGIVGVVDYDAPAEHRRDLLQAMTDTMACRGPDAEGLWFGRAAGLGHRRLSVIDPEHGRQPMTAEHEGRGAAITFSGEIYNFRELRAELTSHGHRFRTSCDTEVVLRGYLQWGAALVERLNGMFAFAVWDEHSEELLLVRDRMGVKPLYYWPTAAGVRFGSEPKAVLADRTLSRRVGPDGLCEVLDMVKTPEAAVFSGLVEVRPGQLVRVGRGGVRRQTYWRLEAREHTDDLPTTIGTVRDLLADTVTRQLVSDVPLGTLLSGGLDSSAVTALAARSGPVRSFSVDFRGAADAFASDAVRREADAPYVRELAGHVGADHLEVLLDSPGLSDPAVRSAVLRATDLPPAYWGDMWPSLYLFFRAVRENVTVALSGEAADELFGGYRWFRNPLALRAATFPWLTPGSARYFGGSSLFQAGLLDKLDLDGYRAARYAEALAEVPVLPGESAPERRMREIGHLNLTRFVQTLLDRKDRMSMAVGLEVRVPFCDHRLVEYVFNVPWEMKSFDGREKSLLRAAVADLLPRSVVERVKTPYPATQDPGYEGALRAELAGVLADPDAPVLPLLDRERALAAAARPTGAVSRPYDRGSLELVLWLNSWLAEYEVTLDL

SEQ ID NO: 36434 - protein, 587 aa, Lactococcus lactis subsp. cremoris
ERGPQMANRIEGKAVDKTSIKHFVKLIRAAKPRYLFFVIGIVAGIIGTLIQLQVPKMVQPLVNSFGHGVNGGKVALVIALYIGSAAVSAIAAIVLGIFGESVVKNLRTRVWDKMIHLPVKYFDEVKTGEMSSRLANDTTQVKNLIANSIPQAFTSILLLVGSIIFMLQMQWRLTLAMIIAVPIVMLIMFPIMTFGQKIGWTRQDSLANFQGIASESLSEIRLVKSSNAEKQASKKAENDVNALYKIGVKEAVFDGLMSPVMMLSMMLMIFGLLAYGIYLISTGVMSLGTLLGMMMYLMNLIGVVPTVATFFTELAKASGSTGRLTELLDEEQEVLHQGDSLDLEGKTLSAHHVDFAYDDSEQILHDISFEAQPNSIIAFAGPSGGGKSTIFSLLERFYQPTAGEITIGGQPIDSVSLENWRSQIGFVSQDSAIMAGTIRENLTYGLEGNFTDEDLWQVLDLAFARSFVENMPDQLNTEVGERGVKISGGQRQRLAIARAFLRNPKILMLDEATASLDSESESMVQRALDSLMKGRTTLVIAHRLSTIVDADKIYFIEKGEITGSGKHNELVATHPLYAKYVSEQLTV

SEQ ID NO: 36435 - protein, 587 aa, Lactococcus lactis subsp. lactis
ERGPQMANRIEGKAVDKTSIKHFVKLIRAAKPRYLFFIIGILAGIVGTLIQLQVPKMVQPLVNSFGHGVNGGKVALVIALYIGSAAVSAIAAIVLGIFGESVVKNLRTRVWDKMIHLPVKYFDEVKTGEMSSRLANDTTQVKNLIANSIPQAFTSILLLVGSIVFMLQMQWRLTLAMIIAVPVVMLIMFPIMTFGQKIGRTRQDSLANFQGIASESLSEIRLVKSSNAEKQASKKAENDVNALYKIGVKEAIFDGLMSPVMMLSMMLMIFGLLAYGIYLISTGVMSLGTLLGMMMYLMNLIGAVPTVATFFTELAKASGSTGRLTELLDEEQEVLHQGESLDLEGKTLSARHVDFAYDDSEQILRDISFEAQPNSIIAFAGPSGGGKSTIFSLLERFYQPTAGEITIDGQPIDNISLENWRSQIGFVSQDSAIMAGTIRENLTYGLEGDYTDEDLWQVLDLAFARSFVENMPDQLNTEVGERGVKISGGQRQRLAIARAFLRNPKILMLDEATASLDSESESMVQKALDSLMKGRTTLVIAHRLSTIVDADKIYFIEKGQITGSGKHNELVATHPLYAKYVSEQLTV

SEQ ID NO: 36436 - protein, 587 aa, Lactococcus lactis subsp. lactis
ERGPQMANRIEGKAVDKTSIKHFIKLIRAAKPRYLFFIIGILAGIVGTLIQLQVPKMVQPLVNSFGHGVNGGKVALVIALYIGSAAVSAIAAIVLGIFGESVVKNLRTRVWDKMIHLPVKYFDEVKTGEMSSRLANDTTQVKNLIANSIPQAFTSILLLVGSIVFMLQMQWRLTLAMIIAVPVVMLIMFPIMTFGQKIGRTRQDSLANFQGIASESLSEIRLVKSSNAEKQASKKAENDVNALYKIGVKEAIFDGLMSPVMMLSMMLMIFGLLAYGIYLISTGVMSLGTLLGMMMYLMNLIGAVPTVATFFTELAKASGSTGRLTELLDEEQEVLHQGESLDLEGKTLSARHVDFAYDDSEQILRDISFEAQPNSIIAFAGPSGGGKSTIFSLLERFYQPTAGEITIDGQPIDNISLENWRSQIGFVSQDSAIMAGTIRENLTYGLEGDYTDEDLWQVLDLAFARSFVENMPDQLNTEVGERGVKISGGQRQRLAIARAFLRNPKILMLDEATASLDSESESMVQKALDSLMKGRTTLVIAHRLSTIVDADKIYFIEKGQITGSGKHNELVATHPLYAKYVSEQLTV

SEQ ID NO: 36437 - protein, 587 aa, Lactococcus lactis subsp. lactis
ERGPQMANRIEGKAVDKTSIKHFIKLIRAAKPRYLFFIIGILAGIVGTLIQLQVPKMVQPLVNSFGHGVNGGKVALVIALYIGSAAVSAIAAIVLGIFGESVVKNLRTRVCDKMIHLPVKYFDEVKTGEMSSRLANDTTQVKNLIANSIPQAFTSILLLVGSIVFMLQMQWRLTLAMIIAVPVVMLIMFPIMTFGQKIGRTRQDSLANFQGIASESLSEIRLVKSSNAEKQASKKAENDVNALYKIGVKEAIFDGLMSPVMMLSMMLMIFGLLAYGIYLISTGVMSLGTLLGMMMYLMNLIGAVPTVATFFTELAKASGSTGRLTELLDEEQEVLHQGESLDLEGKTLSARHVDFAYDDSEQILRDISFEAQPNSIIAFAGPSGGGKSTIFSLLERFYQPTAGEITIDGQPIDNISLENWRSQIGFVSQDSAIMAGTIRENLTYGLEGDYTDEDLWQVLDLAFARSFVENMPDQLNTEVGERGVKISGGQRQRLAIARAFLRNPKILMLDEATASLDSESESMVQKALDSLMKGRTTLVIAHRLSTIVDADKIYFIEKGQITGSGKHNELVATHPLYAKYVSEQLTV

SEQ ID NO: 36438 - protein, 587 aa, Lactococcus lactis subsp. lactis
ERGPQMANRIEGKAVDKTSIKHFIKLIRAAKPRYLFFIIGILAGIVGTLIQLQVPKMVQPLVNSFGHGVNGGKVALVIALYIGSAAVSAIAAIVLGIFGESVVKNLRTRVWDKMIHLPVKYFDEVKTGEMSSRLANDTTQVKNLIANSIPQAFTSILLLVGSIVFMLQMQWRLTLAMIIAVPVVMLIMFPIMTFGQKIGRTRQDSLANFQGIASESLSEIRLVKSSNAEKQASKKAENDVNALYKIGVKEAIFDGLMSPVMMLSMMLMIFGLLAYGIYLISTGVMSLGTLLGMMMYLMNLIGAVPTVATFFTELAKASGSTGRLTELLDEEQEVLHQGESLDLEGKTLSARHVDFAYDDSEQILRDISFEAQPNSIIAFAGPSGGGKSTIFSLLERFYQPTAGEITIDGQPIDNISLENWRSQIGFVSQDSAIMAGTIRENLTYGLEGDYTDEDLWQVLDLAFARSFVENMPDQLNTEVGERGVKISGGQRQRLAIARAFLRNPKILMLDEATASLDSESESMVQKALDSLMKGRTTLVIAHRVSTIVDADKIYFIEKGQITGSGKHNELVATHPLYAKYVSEQLTV

SEQ ID NO: 36439 - protein, 587 aa, Lactococcus lactis subsp. lactis
ERGPQMANRIEGKAVDKTSIKHFVKLIRAAKPRYLFFIIGILAGIVGTLIQLQVPKMVQPLVNSFGHGVNGGKVALVIALYIGSAAVSAIAAIVLGIFGESVVKNLRTRVWDKMIHLPVKYFDEVKTGEMSSRLANDTTQVKNLIANSIPQAFTSILLLVGSIVFMLQMQWRLTLAMIIAVPVVMLIMFPIMTFGQKIGRTRQDSLANFQGIASESLSEIRLVKSSNAEKQASKKAENDVNALYKIGVKEAIFDGLMSPVMMLSMMLMIFGLLAYGIYLISTGVMSLGTLLGMMMYLMNLIGAVPTVATFFTELAKASGSTGRLTELLDEEQEVLHQGESLDLEGKTLSARHVDFAYDDSEQILHDISFEAQPNSIIAFAGPSGGGKSTIFSLLERFYQPTAGKITIDDQPIDNISLENWRSQIGFVSQDSAIMAGTIRENLTYGLEGDYTDDDLWQVLDLAFARSFVENMPDQLNTEVGERGVKISGGQRQRLAIARAFLRNPKILMLDEATASLDSESESMVQKALDSLMKGRTTLVIAHRLSTIVDADKIYFIEKGQITGSGKHNELVATHPLYAKYVSEQLTV

SEQ ID NO: 36440 - protein, 587 aa, Lactococcus lactis subsp. lactis
ERGPQMANRIEGKAVDKTSIKHFVKLIRAAKPRYLFFIIGILAGIVGTLIQLQVPKMVQPLVNSFGHGVNGGKVALVIALYIGSAAVSAIAAIVLGIFGESVVKNLRTRVWDKMIHLPVKYFDEVKTGEMSSRLANDTTQVKNLIANSIPQAFTSILLLVGSIVFMLQMQWRLTLAMIIAVPVVMLIMFPIMTFGQKIGRTRQDSLANFQGIASESLSEIRLVKSSNAEKQASKKAENDVNALYKIGVKEAIFDGLMSPVMMLSMMLMIFGLLAYGIYLISTGVLSLGTLLGMMMYLMNLIGAVPTVATFFTELAKASGSTGRLTELLDEEQEVLHQGESLDLEGKTLLARHVDFAYDDSEQILRDISFEAQPNSIIAFAGPSGGGKSTIFSLLERFYQPTAGEITIDGQPIDNISLENWRSQIGFVSQDSAIMAGTIRENLTYGLEGDYTDEDLWQVLDLAFARSFVENMPDQLNTEVGERGVKISGGQRQRLAIARAFLRNPKILMLDEATASLDSESESMVQKALDSLMKGRTTLVIAHRLSTIVDADKIYFIEKGQITGSGKHNELVATHPLYAKYVSEQLTV

SEQ ID NO: 36441 - protein, 587 aa, Lactococcus lactis subsp. lactis
ERGPQMANRIEGKAVDKTSIKHFVKLIRAAKPRYLFFIIGILAGIVGTLIQLQVPKMVQPLVNSFGHGVNGGKVALVIALYIGSAAVSAIAAIVLGIFGESVVKNLRTRVWDKMIHLPVKYFDEVKTGEMSSRLANDTTQVKNLIANSIPQAFTSILLLVGSIVFMLQMQWRLTLAMIIAVPVVMLIMLPIMTFGQKIGRTRQDSLANFQGIASESLSEIRLVKSSNAEKQASKKAENDVNALYKIGVKEAIFDGLMSPVMMLSMMLMIFGLLAYGIYLISTGVMSLGTLLGMMMYLMNLIGAVPTVATFFTELAKASGSTGRLTELLDEEQEVLHQGESLDLEGKTLSARHVDFAYDDSEQILRDISFEAQPNSIIAFAGPSGGGKSTIFSLLERFYQPTAGEITIDGQPIDNISLENWRSQIGFVSQDSAIMAGTIRENLTYGLEGDYTDEDLWQVLDLAFARSFVENMPDQLNTEVGERGVKISGGQRQRLAIARAFLRNPKILMLDEATASLDSESESMVQKALDSLMKGRTTLVIAHRLSTIVDADKIYFIEKGQITGSGKHNELVATHPLYAKYVSEQLTV

SEQ ID NO: 36442 - protein, 269 aa, Saccharomyces cerevisiae
LGRGGSSRVYKVKGSGNRVYALKRVSFDAFDDSSIDGFKGEIELLEIERPKRVIQLLDYEMGDGLLYLIMECGDHDLSQILNQRSGMPLDFNFVRFYTKEMLLCIKVVHDAGIVHSDLKPANFVLVKGILKIIDFGIANAVPEHTVNIYRETQIGTPNYMAPEALVAMNYTQNSENQHEGNKWKVGRPSDMWSCGCIIYQMIYGKPPYGSFQGQNRLLAIMNPDVKIPFPEHTSNNEKIPKSAIELMKACLYRNPDKRWTVDKVLSSTF

SEQ ID NO: 36443 - DNA, 11722 bp, Artificial sequence
  Synthetic construct
cgcgcctgcctgcaggtactcgaggtcattcatatgcttgagaagagagtcgggatagtccaaaataaaacaaaggtaagattacctggtcaaaagtgaaaacatcagttaaaaggtggtataaagtaaaatatcggtaataaaaggtggcccaaagtgaaatttactcttttctactattataaaaattgaggatgtttttgtcggtactttgatacgtcatttttgtatgaattggtttttaagtttattcgcttttggaaatgcatatctgtatttgagtcgggttttaagttcgtttgcttttgtaaatacagagggatttgtataagaaatatctttagaaaaacccatatgctaatttgacataatttttgagaaaaatatatattcaggcgaattctcacaatgaacaataataagattaaaatagctttcccccgttgcagcgcatgggtattttttctagtaaaaataaaagataaacttagactcaaaacatttacaaaaacaacccctaaagttcctaaagcccaaagtgctatccacgatccatagcaagcccagcccaacccaacccaacccaacccaccccagtccagccaactggacaatagtctccacacccccccactatcaccgtgagttgtccgcacgcaccgcacgtctcgcagccaaaaaaaaaaagaaagaaaaaaaagaaaaagaaaaaacagcaggtgggtccgggtcgtgggggccggaaacgcgaggaggatcgcgagccagcgacgaggagcttaggcctcatcgttgaagatgcctctgccgacagtggtcccaaagatggacccccacccacgaggagcatcgtggaaaaagaagacgttccaaccacgtcttcaaagcaagtggattgatgtgatatctccactgacgtaagggatgacgcacaatcccactatccttcgaggcctcatcgttgaagatgcctctgccgacagtggtcccaaagatggacccccacccacgaggagcatcgtggaaaaagaagacgttccaaccacgtcttcaaagcaagtggattgatgtgatatctccactgacgtaagggatgacgcacaatcccactatccttcgaagctccctccctccgcttccaaagaaacgccccccatcgccactatatacatacccccccctctcctcccatccccccaacccttctagaaccatcttccacacactcaagccacactattggagaacacacagggacaacacaccataagatccaagggaggcctccgccgccgccggtaaccaccccgcccctctcctctttctttctccgtttttttttccgtctcggtctcgatctttggccttggtagtttgggtgggcgagaggcggcttcgtgcgcgcccagatcggtgcgcgggaggggcgggatctcgcggctggggctctcgccggcgtggatccggcccggatctcgcggggaatggggctctcggatgtagatctgcgatccgccgttgttgggggagatgatggggggtttaaaatttccgccgtgctaaacaagatcaggaagaggggaaaagggcactatggtttatatttttatatatttctgctgcttcgtcaggcttagatgtgctagatctttctttcttctttttgtgggtagaatttgaatccctcagcattgttcatcggtagtttttcttttcatgatttgtgacaaatgcagcctcgtgcggagcttttttgtaggtagaagcggaccggtcgcgcctcagcagtcgctgtcgttaacccagcggtactcgctgaggcgatcgcgggcccggtaccctgcaatgtgaccctagacttgtccatcttctggattggccaacttaattaatgtatgaaataaaaggatgcacacatagtgacatgctaatcactataatgtgggcatcaaagttgtgtgttatgtgtaattactaattatctgaataagagaaagagatcatccatatttcttatcctaaatgaatgtcacgtgtctttataattctttgatgaaccagatgcattttattaaccaattccatatacatataaatattaatcatatataattaatatcaattgggttagcaaaacaaatctagtctaggtgtgttttgctaattattgggggatagtgcaaaaagaaatctacgttctcaataattcagatagaaaacttaataaagtgagataatttacatagattgcttttatcctttgatatatgtgaaaccatgcatgatataaggaaaatagatagagaaataattttttacatcgttgaatatgtaaacaatttaattcaagaagctaggaatataaatattgaggagtttatgattattattattattttgatgttcaatgaagttttttttaatttcatatgaagtatacaaaaattcttcatagatttttgtttctatgccgtagttatctttaatatatttgtggttgaagaaatttattgctagaaacgaatggattgtcaatttttttttaaagcaaatatatatgaaattatactgtatattattttagtcatgattaaaatgtggccttaattgaatcatctttctcattcattttttcaaaagcatatcaggatgattgatatttatctattttaaaaattaatttaagggttcaaattaaatttaacttaaaagtgtcctaaccgtagttaaaggtttactttaaaaaaatactatgaaaaatctaatcttctatgaatcgacctgcaggatttaaatccatcgttctggggcctaacgggccaagcttactcgaggtcattcatatgcttgagaagagagtcgggatagtccaaaataaaacaaaggtaagattacctggtcaaaagtgaaaacatcagttaaaaggtggtataaagtaaaatatcggtaataaaaggtggcccaaagtgaaatttactcttttctactattataaaaattgaggatgtttttgtcggtactttgatacgtcatttttgtatgaattggtttttaagtttattcgcttttggaaatgcatatctgtatttgagtcgggttttaagttcgtttgcttttgtaaatacagagggatttgtataagaaatatctttagaaaaacccatatgctaatttgacataatttttgagaaaaatatatattcaggcgaattctcacaatgaacaataataagattaaaatagctttcccccgttgcagcgcatgggtattttttctagtaaaaataaaagataaacttagactcaaaacatttacaaaaacaacccctaaagttcctaaagcccaaagtgctatccacgatccatagcaagcccagcccaacccaacccaacccaacccaccccagtccagccaactggacaatagtctccacacccccccactatcaccgtgagttgtccgcacgcaccgcacgtctcgcagccaaaaaaaaaaagaaagaaaaaaaagaaaaagaaaaaacagcaggtgggtccgggtcgtgggggccggaaacgcgaggaggatcgcgagccagcgacgaggccggccctccctccgcttccaaagaaacgccccccatcgccactatatacatacccccccctctcctcccatccccccaaccctaccaccaccaccaccaccacctccacctcctcccccctcgctgccggacgacgagctcctcccccctccccctccgccgccgccgcgccggtaaccaccccgcccctctcctctttctttctccgtttttttttccgtctcggtctcgatctttggccttggtagtttgggtgggcgagaggcggcttcgtgcgcgcccagatcggtgcgcgggaggggcgggatctcgcggctggggctctcgccggcgtggatccggcccggatctcgcggggaatggggctctcggatgtagatctgcgatccgccgttgttgggggagatgatggggggtttaaaatttccgccgtgctaaacaagatcaggaagaggggaaaagggcactatggtttatatttttatatatttctgctgcttcgtcaggcttagatgtgctagatctttctttcttctttttgtgggtagaatttgaatccctcagcattgttcatcggtagtttttcttttcatgatttgtgacaaatgcagcctcgtgcggagcttttttgtaggtagaagtgatcaaccatggcgcaagttagcagaatctgcaatggtgtgcagaacccatctcttatctccaatctctcgaaatccagtcaacgcaaatctcccttatcggtttctctgaagacgcagcagcatccacgagcttatccgatttcgtcgtcgtggggattgaagaagagtgggatgacgttaattggctctgagcttcgtcctcttaaggtcatgtcttctgtttccacggcgtgcatgcttcacggtgcaagcagccggcccgcaaccgcccgcaaatcctctggcctttccggaaccgtccgcattcccggcgacaagtcgatctcccaccggtccttcatgttcggcggtctcgcgagcggtgaaacgcgcatcaccggccttctggaaggcgaggacgtcatcaatacgggcaaggccatgcaggcgatgggcgcccgcatccgtaaggaaggcgacacctggatcatcgatggcgtcggcaatggcggcctcctggcgcctgaggcgccgctcgatttcggcaatgccgccacgggctgccgcctgacgatgggcctcgtcggggtctacgatttcgacagcaccttcatcggcgacgcctcgctcacaaagcgcccgatgggccgcgtgttgaacccgctgcgcgaaatgggcgtgcaggtgaaatcggaagacggtgaccgtcttcccgttaccttgcgcgggccgaagacgccgacgccgatcacctaccgcgtgccgatggcctccgcacaggtgaagtccgccgtgctgctcgccggcctcaacacgcccggcatcacgacggtcatcgagccgatcatgacgcgcgatcatacggaaaagatgctgcagggctttggcgccaaccttaccgtcgagacggatgcggacggcgtgcgcaccatccgcctggaaggccgcggcaagctcaccggccaagtcatcgacgtgccgggcgacccgtcctcgacggccttcccgctggttgcggccctgcttgttccgggctccgacgtcaccatcctcaacgtgctgatgaaccccacccgcaccggcctcatcctgacgctgcaggaaatgggcgccgacatcgaagtcatcaacccgcgccttgccggcggcgaagacgtggcggacctgcgcgttcgctcctccacgctgaagggcgtcacggtgccggaagaccgcgcgccttcgatgatcgacgaatatccgattctcgctgtcgccgccgccttcgcggaaggggcgaccgtgatgaacggtctggaagaactccgcgtcaaggaaagcgaccgcctctcggccgtcgccaatggcctcaagctcaatggcgtggattgcgatgagggcgagacgtcgctcgtcgtgcgtggccgccctgacggcaaggggctcggcaacgcctcgggcgccgccgtcgccacccatctcgatcaccgcatcgccatgagcttcctcgtcatgggcctcgtgtcggaaaaccctgtcacggtggacgatgccacgatgatcgccacgagcttcccggagttcatggacctgatggccgggctgggcgcgaagatcgaactctccgatacgaaggctgcctgatgagctcgaattcccgatcgttcaaacatttggcaataaagtttcttaagattgaatcctgttgccggtcttgcgatgattatcatataatttctgttgaattacgttaagcatgtaataattaacatgtaatgcatgacgttatttatgagatgggtttttatgattagagtcccgcaattatacatttaatacgcgatagaaaacaaaatatagcgcgcaaactaggataaattatcgcgcgcggtgtcatctatgttactagatcggggatgggggatccactagtgatatccgtcgactggtacctacgcgtagctagcccgtgaagtttctcatctaagcccccatttggacgtgaatgtagacacgtcgaaataaagatttccgaattagaataatttgtttattgctttcgcctataaatacgacggatcgtaatttgtcgttttatcaaaatgtactttcattttataataacgctgcggacatctacatttttgaattgaaaaaaaattggtaattactctttctttttctccatattgaccatcatactcattgctgatccatgtagatttcccggacatgaagccatttacaattgaatatatcctgccgccgctgccgctttgcacccggtggagcttgcatgttggtttctacgcagaactgagccggttaggcagataatttccattgagaactgagccatgtgcaccttccccccaacacggtgagcgacggggcaacggagtgatccacatgggacttttcctagcttggctgccatttttggggtgaggccgttcgcggccgaggggcgcagcccctggggggatgggaggcccgcgttagcgggccgggagggttcgagaagggggggcaccccccttcggcgtgcgcggtcacgcgcacagggcgcagccctggttaaaaacaaggtttataaatattggtttaaaagcaggttaaaagacaggttagcggtggccgaaaaacgggcggaaacccttgcaaatgctggattttctgcctgtggacagcccctcaaatgtcaataggtgcgcccctcatctgtcagcactctgcccctcaagtgtcaaggatcgcgcccctcatctgtcagtagtcgcgcccctcaagtgtcaataccgcagggcacttatccccaggcttgtccacatcatctgtgggaaactcgcgtaaaatcaggcgttttcgccgatttgcgaggctggccagctccacgtcgccggccgaaatcgagcctgcccctcatctgtcaacgccgcgccgggtgagtcggcccctcaagtgtcaacgtccgcccctcatctgtcagtgagggccaagttttccgcgaggtatccacaacgccggcggccggccgcggtgtctcgcacacggcttcgacggcgtttctggcgcgtttgcagggccatagacggccgccagcccagcggcgagggcaaccagcccggtgagcgtcggaaagggtcgatcgaccgatgcccttgagagccttcaacccagtcagctccttccggtgggcgcggggcatgactatcgtcgccgcacttatgactgtcttctttatcatgcaactcgtaggacaggtgccggcagcgctctgggtcattttcggcgaggaccgctttcgctggagcgcgacgatgatcggcctgtcgcttgcggtattcggaatcttgcacgccctcgctcaagccttcgtcactggtcccgccaccaaacgtttcggcgagaagcaggccattatcgccggcatggcggccgacgcgctgggctacgtcttgctggcgttcgcgacgcgaggctggatggccttccccattatgattcttctcgcttccggcggcatcgggatgcccgcgttgcaggccatgctgtccaggcaggtagatgacgaccatcagggacagcttcaaggatcgctcgcggctcttaccagcctaacttcgatcattggaccgctgatcgtcacggcgatttatgccgcctcggcgagcacatggaacgggttggcatggattgtaggcgccgccctataccttgtctgcctccccgcgttgcgtcgcggtgcatggagccgggccacctcgacctgaatggaagccggcggcacctcgctaacggattcaccactccaagaattggagccaatcaattcttgcggagaactgtgaatgcgcaaaccaacccttggcagaacatatccatcgcgtccgccatctccagcagccgcacgcggcgcatctcgggcagcgttgggtcctggccacgggtgcgcatgatcgtgctcctgtcgttgaggacccggctaggctggcggggttgccttactggttagcagaatgaatcaccgatacgcgagcgaacgtgaagcgactgctgctgcaaaacgtctgcgacctgagcaacaacatgaatggtcttcggtttccgtgtttcgtaaagtctggaaacgcggaagtcagcgccctgcaccattatgttccggatctgcatcgcaggatgctgctggctaccctgtggaacacctacatctgtattaacgaagcgctggcattgaccctgagtgatttttctctggtcccgccgcatccataccgccagttgtttaccctcacaacgttccagtaaccgggcatgttcatcatcagtaacccgtatcgtgagcatcctctctcgtttcatcggtatcattacccccatgaacagaaatcccccttacacggaggcatcagtgaccaaacaggaaaaaaccgcccttaacatggcccgctttatcagaagccagacattaacgcttctggagaaactcaacgagctggacgcggatgaacaggcagacatctgtgaatcgcttcacgaccacgctgatgagctttaccgcagctgcctcgcgcgtttcggtgatgacggtgaaaacctctgacacatgcagctcccggagacggtcacagcttgtctgtaagcggatgccgggagcagacaagcccgtcagggcgcgtcagcgggtgttggcgggtgtcggggcgcagccatgacccagtcacgtagcgatagcggagtgtatactggcttaactatgcggcatcagagcagattgtactgagagtgcaccatatgcggtgtgaaataccgcacagatgcgtaaggagaaaataccgcatcaggcgctcttccgcttcctcgctcactgactcgctgcgctcggtcgttcggctgcggcgagcggtatcagctcactcaaaggcggtaatacggttatccacagaatcaggggataacgcaggaaagaacatgtgagcaaaaggccagcaaaaggccaggaaccgtaaaaaggccgcgttgctggcgtttttccataggctccgcccccctgacgagcatcacaaaaatcgacgctcaagtcagaggtggcgaaacccgacaggactataaagataccaggcgtttccccctggaagctccctcgtgcgctctcctgttccgaccctgccgcttaccggatacctgtccgcctttctcccttcgggaagcgtggcgctttctcatagctcacgctgtaggtatctcagttcggtgtaggtcgttcgctccaagctgggctgtgtgcacgaaccccccgttcagcccgaccgctgcgccttatccggtaactatcgtcttgagtccaacccggtaagacacgacttatcgccactggcagcagccactggtaacaggattagcagagcgaggtatgtaggcggtgctacagagttcttgaagtggtggcctaactacggctacactagaaggacagtatttggtatctgcgctctgctgaagccagttaccttcggaaaaagagttggtagctcttgatccggcaaacaaaccaccgctggtagcggtggtttttttgtttgcaagcagcagattacgcgcagaaaaaaaggatctcaagaagatcctttgatcttttctacggggtctgacgctcagtggaacgaaaactcacgttaagggattttggtcatgagattatcaaaaaggatcttcacctagatccttttaaattaaaaatgaagttttaaatcaatctaaagtatatatgagtaaacttggtctgacagttaccaatgcttaatcagtgaggcacctatctcagcgatctgtctatttcgttcatccatagttgcctgactccccgtcgtgtagataactacgatacgggagggcttaccatctggccccagtgctgcaatgataccgcgagacccacgctcaccggctccagatttatcagcaataaaccagccagccggaagggccgagcgcagaagtggtcctgcaactttatccgcctccatccagtctattaattgttgccgggaagctagagtaagtagttcgccagttaatagtttgcgcaacgttgttgccattgctgcaggtcgggagcacaggatgacgcctaacaattcattcaagccgacaccgcttcgcggcgcggcttaattcaggagttaaacatcatgagggaagcggtgatcgccgaagtatcgactcaactatcagaggtagttggcgtcatcgagcgccatctcgaaccgacgttgctggccgtacatttgtacggctccgcagtggatggcggcctgaagccacacagtgatattgatttgctggttacggtgaccgtaaggcttgatgaaacaacgcggcgagctttgatcaacgaccttttggaaacttcggcttcccctggagagagcgagattctccgcgctgtagaagtcaccattgttgtgcacgacgacatcattccgtggcgttatccagctaagcgcgaactgcaatttggagaatggcagcgcaatgacattcttgcaggtatcttcgagccagccacgatcgacattgatctggctatcttgctgacaaaagcaagagaacatagcgttgccttggtaggtccagcggcggaggaactctttgatccggttcctgaacaggatctatttgaggcgctaaatgaaaccttaacgctatggaactcgccgcccgactgggctggcgatgagcgaaatgtagtgcttacgttgtcccgcatttggtacagcgcagtaaccggcaaaatcgcgccgaaggatgtcgctgccgactgggcaatggagcgcctgccggcccagtatcagcccgtcatacttgaagctaggcaggcttatcttggacaagaagatcgcttggcctcgcgcgcagatcagttggaagaatttgttcactacgtgaaaggcgagatcaccaaggtagtcggcaaataatgtctaacaattcgttcaagccgacgccgcttcgcggcgcggcttaactcaagcgttagatgctgcaggcatcgtggtgtcacgctcgtcgtttggtatggcttcattcagctccggttcccaacgatcaaggcgagttacatgatcccccatgttgtgcaaaaaagcggttagctccttcggtcctccgatcgaggatttttcggcgctgcgctacgtccgcgaccgcgttgagggatcaagccacagcagcccactcgaccttctagccgacccagacgagccaagggatctttttggaatgctgctccgtcgtcaggctttccgacgtttgggtggttgaacagaagtcattatcgcacggaatgccaagcactcccgaggggaaccctgtggttggcatgcacatacaaatggacgaacggataaaccttttcacgcccttttaaatatccgattattctaataaacgctcttttctcttaggtttacccgccaatatatcctgtcaaacactgatagtttaaactgaaggcgggaaacgacaatctgg

SEQ ID NO: 36444 - DNA, 9769 bp, Artificial sequence
  Synthetic construct
ggtccgatgtgagacttttcaacaaagggtaatatccggaaacctcctcggattccattgcccagctatctgtcactttattgtgaagatagtggaaaaggaaggtggctcctacaaatgccatcattgcgataaaggaaaggccatcgttgaagatgcctctgccgacagtggtcccaaagatggacccccacccacgaggagcatcgtggaaaaagaagacgttccaaccacgtcttcaaagcaagtggattgatgtgatggtccgattgagacttttcaacaaagggtaatatccggaaacctcctcggattccattgcccagctatctgtcactttattgtgaagatagtggaaaaggaaggtggctcctacaaatgccatcattgcgataaaggaaaggccatcgttgaagatgcctctgccgacagtggtcccaaagatggacccccacccacgaggagcatcgtggaaaaagaagacgttccaaccacgtcttcaaagcaagtggattgatgtgatatctccactgacgtaagggatgacgcacaatcccactatccttcgcaagacccttcctctatataaggaagttcatttcatttggagaggaccaggtggtaccggcgcgcctcagcagtcgctgtcgttaacccagcggtactcgctgaggcgatcgcgggccctgatcacctgtcgtacagtatttctacatttgatgtgtgatttgtgaagaacatcaaacaaaacaagcactggctttaatatgatgataagtattatggtaattaattaattggcaaaaacaacaatgaagctaaaattttatttattgagccttgcggttaatttcttgtgatgatctttttttttattttctaattatatatagtttcctttgctttgaaatgctaaaggtttgagagagttatgctctttttttcttcctctttcttttttaactttatcatacaaattttgaataaaaatgtgagtacattgagctcatttaaataagcttgatggggatcagattgtcgtttcccgccttcagtttaaactatcagtgtttgacaggatatattggcgggtaaacctaagagaaaagagcgtttattagaataatcggatatttaaaagggcgtgaaaaggtttatccgttcgtccatttgtatgtgcatgccaaccacagggttcccctcgggagtgcttggcattccgtgcgataatgacttctgttcaaccacccaaacgtcggaaagcctgacgacggagcagcattccaaaaagatcccttggctcgtctgggtcggctagaaggtcgagtgggctgctgtggcttgatccctcaacgcggtcgcggacgtagcgcagcgccgaaaaatcctcgatcggaggaccgaaggagctaaccgcttttttgcacaacatgggggatcatgtaactcgccttgatcgttgggaaccggagctgaatgaagccataccaaacgacgagcgtgacaccacgatgcctgcagcatctaacgcttgagttaagccgcgccgcgaagcggcgtcggcttgaacgaattgttagacattatttgccgactaccttggtgatctcgcctttcacgtagtgaacaaattcttccaactgatctgcgcgcgaggccaagcgatcttcttgtccaagataagcctgcctagcttcaagtatgacgggctgatactgggccggcaggcgctccattgcccagtcggcagcgacatccttcggcgcgattttgccggttactgcgctgtaccaaatgcgggacaacgtaagcactacatttcgctcatcgccagcccagtcgggcggcgagttccatagcgttaaggtttcatttagcgcctcaaatagatcctgttcaggaaccggatcaaagagttcctccgccgctggacctaccaaggcaacgctatgttctcttgcttttgtcagcaagatagccagatcaatgtcgatcgtggctggctcgaagatacctgcaagaatgtcattgcgctgccattctccaaattgcagttcgcgcttagctggataacgccacggaatgatgtcgtcgtgcacaacaatggtgacttctacagcgcggagaatctcgctctctccaggggaagccgaagtttccaaaaggtcgttgatcaaagctcgccgcgttgtttcatcaagccttacggtcaccgtaaccagcaaatcaatatcactgtgtggcttcaggccgccatccactgcggagccgtacaaatgtacggccagcaacgtcggttcgagatggcgctcgatgacgccaactacctctgatagttgagtcgatacttcggcgatcaccgcttccctcatgatgtttaactcctgaattaagccgcgccgcgaagcggtgtcggcttgaatgaattgttaggcgtcatcctgtgctcccgacctgcagcaatggcaacaacgttgcgcaaactattaactggcgaactacttactctagcttcccggcaacaattaatagactggatggaggcggataaagttgcaggaccacttctgcgctcggcccttccggctggctggtttattgctgataaatctggagccggtgagcgtgggtctcgcggtatcattgcagcactggggccagatggtaagccctcccgtatcgtagttatctacacgacggggagtcaggcaactatggatgaacgaaatagacagatcgctgagataggtgcctcactgattaagcattggtaactgtcagaccaagtttactcatatatactttagattgatttaaaacttcatttttaatttaaaaggatctaggtgaagatcctttttgataatctcatgaccaaaatcccttaacgtgagttttcgttccactgagcgtcagaccccgtagaaaagatcaaaggatcttcttgagatcctttttttctgcgcgtaatctgctgcttgcaaacaaaaaaaccaccgctaccagcggtggtttgtttgccggatcaagagctaccaactctttttccgaaggtaactggcttcagcagagcgcagataccaaatactgtccttctagtgtagccgtagttaggccaccacttcaagaactctgtagcaccgcctacatacctcgctctgctaatcctgttaccagtggctgctgccagtggcgataagtcgtgtcttaccgggttggactcaagacgatagttaccggataaggcgcagcggtcgggctgaacggggggttcgtgcacacagcccagcttggagcgaacgacctacaccgaactgagatacctacagcgtgagctatgagaaagcgccacgcttcccgaagggagaaaggcggacaggtatccggtaagcggcagggtcggaacaggagagcgcacgagggagcttccagggggaaacgcctggtatctttatagtcctgtcgggtttcgccacctctgacttgagcgtcgatttttgtgatgctcgtcaggggggcggagcctatggaaaaacgccagcaacgcggcctttttacggttcctggccttttgctggccttttgctcacatgttctttcctgcgttatcccctgattctgtggataaccgtattaccgcctttgagtgagctgataccgctcgccgcagccgaacgaccgagcgcagcgagtcagtgagcgaggaagcggaagagcgcctgatgcggtattttctccttacgcatctgtgcggtatttcacaccgcatatggtgcactctcagtacaatctgctctgatgccgcatagttaagccagtatacactccgctatcgctacgtgactgggtcatggctgcgccccgacacccgccaacacccgctgacgcgccctgacgggcttgtctgctcccggcatccgcttacagacaagctgtgaccgtctccgggagctgcatgtgtcagaggttttcaccgtcatcaccgaaacgcgcgaggcagctgcggtaaagctcatcagcgtggtcgtgaagcgattcacagatgtctgcctgttcatccgcgtccagctcgttgagtttctccagaagcgttaatgtctggcttctgataaagcgggccatgttaagggcggttttttcctgtttggtcactgatgcctccgtgtaagggggatttctgttcatgggggtaatgataccgatgaaacgagagaggatgctcacgatacgggttactgatgatgaacatgcccggttactggaacgttgtgagggtaaacaactggcggtatggatgcggcgggaccagagaaaaatcactcagggtcaatgccagcgcttcgttaatacagatgtaggtgttccacagggtagccagcagcatcctgcgatgcagatccggaacataatggtgcagggcgctgacttccgcgtttccagactttacgaaacacggaaaccgaagaccattcatgttgttgctcaggtcgcagacgttttgcagcagcagtcgcttcacgttcgctcgcgtatcggtgattcattctgctaaccagtaaggcaaccccgccagcctagccgggtcctcaacgacaggagcacgatcatgcgcacccgtggccaggacccaacgctgcccgagatgcgccgcgtgcggctgctggagatggcggacgcgatggatatgttctgccaagggttggtttgcgcattcacagttctccgcaagaattgattggctccaattcttggagtggtgaatccgttagcgaggtgccgccggcttccattcaggtcgaggtggcccggctccatgcaccgcgacgcaacgcggggaggcagacaaggtatagggcggcgcctacaatccatgccaacccgttccatgtgctcgccgaggcggcataaatcgccgtgacgatcagcggtccaatgatcgaagttaggctggtaagagccgcgagcgatccttgaagctgtccctgatggtcgtcatctacctgcctggacagcatggcctgcaacgcgggcatcccgatgccgccggaagcgagaagaatcataatggggaaggccatccagcctcgcgtcgcgaacgccagcaagacgtagcccagcgcgtcggccgccatgccggcgataatggcctgcttctcgccgaaacgtttggtggcgggaccagtgacgaaggcttgagcgagggcgtgcaagattccgaataccgcaagcgacaggccgatcatcgtcgcgctccagcgaaagcggtcctcgccgaaaatgacccagagcgctgccggcacctgtcctacgagttgcatgataaagaagacagtcataagtgcggcgacgatagtcatgccccgcgcccaccggaaggagctgactgggttgaaggctctcaagggcatcggtcgatcgaccctttccgacgctcaccgggctggttgccctcgccgctgggctggcggccgtctatggccctgcaaacgcgccagaaacgccgtcgaagccgtgtgcgagacaccgcggccggccgccggcgttgtggatacctcgcggaaaacttggccctcactgacagatgaggggcggacgttgacacttgaggggccgactcacccggcgcggcgttgacagatgaggggcaggctcgatttcggccggcgacgtggagctggccagcctcgcaaatcggcgaaaacgcctgattttacgcgagtttcccacagatgatgtggacaagcctggggataagtgccctgcggtattgacacttgaggggcgcgactactgacagatgaggggcgcgatccttgacacttgaggggcagagtgctgacagatgaggggcgcacctattgacatttgaggggctgtccacaggcagaaaatccagcatttgcaagggtttccgcccgtttttcggccaccgctaacctgtcttttaacctgcttttaaaccaatatttataaaccttgtttttaaccagggctgcgccctgtgcgcgtgaccgcgcacgccgaaggggggtgcccccccttctcgaaccctcccggcccgctaacgcgggcctcccatccccccaggggctgcgcccctcggccgcgaacggcctcaccccaaaaatggcagccaagctaggaaaagtcccatgtggatcactccgttgccccgtcgctcaccgtgttggggggaaggtgcacatggctcagttctcaatggaaattatctgcctaaccggctcagttctgcgtagaaaccaacatgcaagctccaccgggtgcaaagcggcagcggcggcaggatatattcaattgtaaatggcttcatgtccgggaaatctacatggatcagcaatgagtatgatggtcaatatggagaaaaagaaagagtaattaccaattttttttcaattcaaaaatgtagatgtccgcagcgttattataaaatgaaagtacattttgataaaacgacaaattacgatccgtcgtatttataggcgaaagcaataaacaaattattctaattcggaaatctttatttcgacgtgtctacattcacgtccaaatgggggcttagatgagaaacttcacgatcgatgcggccaccactcgagaagcttactagtcaacaattggccaatctttgttctaaattgctaataaacgaccatttccgtcaattctccttggttgcaacagtctacccgtcaaatgtttactaatttataagtgtgaagtttgaattatgaaagacgaaatcgtattaaaaattcacaagaataaacaactccatagattttcaaaaaaacagtcacgagaaaaaaaccacagtccgtttgtctgctcttctagtttttattatttttctattaatagttttttgttatttcgagaataaaatttgaacgatgtccgaaccacaaaagccgagccgataaatcctaagccgagcctaactttagccgtaaccatcagtcacggctcccgggctaattcatttgaaccgaatcataatcaacggtttagatcaaactcaaaacaatctaacggcaacatagacgcgtcggtgagctaaaaagagtgtgaaagccaggtcaccatagcattgtctctcccagattttttatttgggaaataatagaagaaatagaaaaaaataaaagagtgagaaaaatcgtagagctatatattcgcacatgtactcgtttcgctttccttagtgttagctgctgccgctgttgtttctcctccatttctctatctttctctctcgctgcttctcgaatcttctgtatcatcttcttcttcttcaaggtgagtctctagatccgttcgcttgattttgctgctcgttagtcgttattgttgattctctatgccgatttcgctagatctgtttagcatgcgttgtggttttatgagaaaatctttgttttgggggttgcttgttatgtgattcgatccgtgcttgttggatcgatctgagttaattcttaaggtttatgtgttagatctatggagtttgaggattcttctcgcttctgtcgatctctcgctgttatttttgtttttttcagtgaagtgaagttgtttagttcgaaatgacttcgtgtatgctcgattgatctggttttaatcttcgatctgttaggtgttgatgtttacaagtgaattctagtgttttctcgttgagatctgtgaagtttgaacctagttttctcaataatcaacatatgaagcgatgtttgagtttcaataaacgctgctaatcttcgaaactaagttgtgatctgattcgtgtttacttcatgagcttatccaattcatttcggtttcattttactttttttttagtgaaccatggcgcaagttagcagaatctgcaatggtgtgcagaacccatctcttatctccaatctctcgaaatccagtcaacgcaaatctcccttatcggtttctctgaagacgcagcagcatccacgagcttatccgatttcgtcgtcgtggggattgaagaagagtgggatgacgttaattggctctgagcttcgtcctcttaaggtcatgtcttctgtttccacggcgtgcatgcttcatggagcttcatctaggccagctactgccaggaagtctagcgggctcagtggcaccgtgcgcatccctggcgataaaagtatttcacacaggagcttcatgttcggaggacttgctagtggagagacgagaatcactggtttgcttgagggcgaagatgttatcaacaccggtaaggcgatgcaagcaatgggtgccagaatccgaaaagagggcgatacgtggatcatcgacggtgttggtaacggaggattgctcgctcccgaagcgccacttgactttgggaacgcagctacggggtgccgtcttactatgggactggtaggcgtgtatgactttgactctaccttcatcggtgacgcgagcctcactaagagaccaatgggacgagtgctgaatcccctgagggagatgggtgtccaggtgaaatctgaggatggtgatcgtcttccggttactctgcgaggccccaagacccccacgccaatcacgtacagggttccgatggcgtcagcacaggtcaagtcagcggtactcctggcgggcctcaacacacctggaatcacaaccgtgattgaacccatcatgactagagaccacacggagaagatgttgcagggtttcggcgctaatctaacggtcgaaaccgacgccgacggcgtgaggacaatccgcttggagggcagaggtaaactgactggccaagtcatcgatgtgcctggagatccctcgtccacagcgtttcccctcgtagctgcgttgctcgtccctggatctgatgtgacgatcctgaatgtcctcatgaatccaactagaaccggcctcatcctcacattgcaggagatgggtgctgacatcgaggttatcaatcctaggttggcaggtggagaggatgtggccgatctgcgcgtgcgttctagtacactcaaaggcgtgaccgtccctgaggatcgcgctccatccatgatcgacgagtaccccattctcgccgttgctgctgcgtttgccgagggcgcaactgtaatgaacggccttgaggagttgagggttaaggagagtgacaggctgtccgcggtggcgaatggcctgaagctaaacggcgtggactgcgacgaaggtgaaacgtcccttgtagtccgtggtcgcccagacgggaaggggttggggaatgcttcgggagctgctgtggcgacgcaccttgatcatagaatcgccatgtcatttctggtgatgggacttgtctccgagaatccggtgaccgttgacgatgctaccatgatcgccacctcctttcctgagttcatggacctcatggcaggcttgggggccaagatcgagctgtctgatactaaggccgcttgaattcccgatcgttcaaacatttggcaataaagtttcttaagattgaatcctgttgccggtcttgcgatgattatcatataatttctgttgaattacgttaagcatgtaataattaacatgtaatgcatgacgttatttatgagatgggtttttatgattagagtcccgcaattatacatttaatacgcgatagaaaacaaaatatagcgcgcaaactaggataaattatcgcgcgcggtgtcatctatgttactagatcggggatcccacgtgcggaccgcctgcaggccgcgttatcaagctaactgca

SEQ ID NO: 36445 - DNA, 8504 bp, Artificial sequence
  Synthetic construct
aggatttttcggcgctgcgctacgtccgcgaccgcgttgagggatcaagccacagcagcccactcgaccttctagccgacccagacgagccaagggatctttttggaatgctgctccgtcgtcaggctttccgacgtttgggtggttgaacagaagtcattatcgcacggaatgccaagcactcccgaggggaaccctgtggttggcatgcacatacaaatggacgaacggataaaccttttcacgcccttttaaatatccgattattctaataaacgctcttttctcttaggtttacccgccaatatatcctgtcaaacactgatagtttaaactgaaggcgggaaacgacaatctgatccccatcaagcttggccagcttctgcaggtccgattgagacttttcaacaaagggtaatatccggaaacctcctcggattccattgcccagctatctgtcactttattgtgaagatagtggaaaaggaaggtggctcctacaaatgccatcattgcgataaaggaaaggccatcgttgaagatgcctctgccgacagtggtcccaaagatggacccccacccacgaggagcatcgtggaaaaagaagacgttccaaccacgtcttcaaagcaagtggattgatgtgatggtccgattgagacttttcaacaaagggtaatatccggaaacctcctcggattccattgcccagctatctgtcactttattgtgaagatagtggaaaaggaaggtggctcctacaaatgccatcattgcgataaaggaaaggccatcgttgaagatgcctctgccgacagtggtcccaaagatggacccccacccacgaggagcatcgtggaaaaagaagacgttccaaccacgtcttcaaagcaagtggattgatgtgatatctccactgacgtaagggatgacgcacaatcccactatccttcgcaagacccttcctctatataaggaagttcatttcatttggagaggacacagaaaaatttgctacattgtttcacaaacttcaaatattattcatttatttgtcagctttcaaactctttgtttcttgtttgttgattagatctggtaccctcagcagtcgctgtgcgatcgccagcggtactcgctgaggtcgacgtagttagttaattcagctttcgttcgtatcatcggtttcgacaacgttcgtcaagttcaatgcatcagtttcattgcgcacacaccagaatcctactgagtttgagtattatggcattgggaaaactgtttttcttgtaccatttgttgtgcttgtaatttactgtgttttttattcggttttcgctatcgaactgtgaaatggaaatggatggagaagagttaatgaatgatatggtccttttgttcattctcaaattaatattatttgttttttctcttatttgttgtgtgttgaatttgaaattataagagatatgcaaacattttgttttgagtaaaaatgtgtcaaatcgtggcctctaatgaccgaagttaatatgaggagtaaaacacttgtagttgtaccattatgcttattcactaggcaacaaatatattttcagacctagaaaagctgcaaatgttactgaatacaagtatgtcctcttgtgttttagacatttatgaactttcctttatgtaattttccagaatccttgtcagattctaatcattgctttataattatagttatactcatggatttgtagttgagtatgaaaatattttttaatgcattttatgacttgccaattgattgacaacgcggccgccactcgagtggaagctagctttccgatcctacctgtcacttcatcaaaaggacagtagaaaaggaaggtggcacctacaaatgccatcattgcgataaaggaaaggctatcattcaagatgcctctgccgacagtggtcccaaagatggacccccacccacgaggagcatcgtggaaaaagaagacgttccaaccacgtcttcaaagcaagtggattgatgtgatacttccactgacgtaagggatgacgcacaatcccactatccttcgcaagacccttcctctatataaggaagttcatttcatttggagaggacacgctgaaatcaccagtctctctctacaagatcggggatctctagctagacgatcgtttcgcatgattgaacaagatggattgcacgcaggttctccggccgcttgggtggagaggctattcggctatgactgggcacaacagacaatcggctgctctgatgccgccgtgttccggctgtcagcgcaggggcgcccggttctttttgtcaagaccgacctgtccggtgccctgaatgaactgcaggacgaggcagcgcggctatcgtggctggccacgacgggcgttccttgcgcagctgtgctcgacgttgtcactgaagcgggaagggactggctgctattgggcgaagtgccggggcaggatctcctgtcatctcaccttgctcctgccgagaaagtatccatcatggctgatgcaatgcggcggctgcatacgcttgatccggctacctgcccattcgaccaccaagcgaaacatcgcatcgagcgagcacgtactcggatggaagccggtcttgtcgatcaggatgatctggacgaagagcatcaggggctcgcgccagccgaactgttcgccaggctcaaggcgcgcatgcccgacggcgaggatctcgtcgtgacccatggcgatgcctgcttgccgaatatcatggtggaaaatggccgcttttctggattcatcgactgtggccggctgggtgtggcggaccgctatcaggacatagcgttggctacccgtgatattgctgaagagcttggcggcgaatgggctgaccgcttcctcgtgctttacggtatcgccgctcccgattcgcagcgcatcgccttctatcgccttcttgacgagttcttctgagcgggactctggggttcgatccccaattcccgatcgttcaaacatttggcaataaagtttcttaagattgaatcctgttgccggtcttgcgatgattatcatataatttctgttgaattacgttaagcatgtaataattaacatgtaatgcatgacgttatttatgagatgggtttttatgattagagtcccgcaattatacatttaatacgcgatagaaaacaaaatatagcgcgcaaactaggataaattatcgcgcgcggtgtcatctatgttactagatcggggatcgggccactcgagtggtggccgcatcgatcgtgaagtttctcatctaagcccccatttggacgtgaatgtagacacgtcgaaataaagatttccgaattagaataatttgtttattgctttcgcctataaatacgacggatcgtaatttgtcgttttatcaaaatgtactttcattttataataacgctgcggacatctacatttttgaattgaaaaaaaattggtaattactctttctttttctccatattgaccatcatactcattgctgatccatgtagatttcccggacatgaagccatttacaattgaatatatcctgccgccgctgccgctttgcacccggtggagcttgcatgttggtttctacgcagaactgagccggttaggcagataatttccattgagaactgagccatgtgcaccttccccccaacacggtgagcgacggggcaacggagtgatccacatgggacttttcctagcttggctgccatttttggggtgaggccgttcgcggccgaggggcgcagcccctggggggatgggaggcccgcgttagcgggccgggagggttcgagaagggggggcaccccccttcggcgtgcgcggtcacgcgcacagggcgcagccctggttaaaaacaaggtttataaatattggtttaaaagcaggttaaaagacaggttagcggtggccgaaaaacgggcggaaacccttgcaaatgctggattttctgcctgtggacagcccctcaaatgtcaataggtgcgcccctcatctgtcagcactctgcccctcaagtgtcaaggatcgcgcccctcatctgtcagtagtcgcgcccctcaagtgtcaataccgcagggcacttatccccaggcttgtccacatcatctgtgggaaactcgcgtaaaatcaggcgttttcgccgatttgcgaggctggccagctccacgtcgccggccgaaatcgagcctgcccctcatctgtcaacgccgcgccgggtgagtcggcccctcaagtgtcaacgtccgcccctcatctgtcagtgagggccaagttttccgcgaggtatccacaacgccggcggccggccgcggtgtctcgcacacggcttcgacggcgtttctggcgcgtttgcagggccatagacggccgccagcccagcggcgagggcaaccagcccggtgagcgtcggaaagggtcgatcgaccgatgcccttgagagccttcaacccagtcagctccttccggtgggcgcggggcatgactatcgtcgccgcacttatgactgtcttctttatcatgcaactcgtaggacaggtgccggcagcgctctgggtcattttcggcgaggaccgctttcgctggagcgcgacgatgatcggcctgtcgcttgcggtattcggaatcttgcacgccctcgctcaagccttcgtcactggtcccgccaccaaacgtttcggcgagaagcaggccattatcgccggcatggcggccgacgcgctgggctacgtcttgctggcgttcgcgacgcgaggctggatggccttccccattatgattcttctcgcttccggcggcatcgggatgcccgcgttgcaggccatgctgtccaggcaggtagatgacgaccatcagggacagcttcaaggatcgctcgcggctcttaccagcctaacttcgatcattggaccgctgatcgtcacggcgatttatgccgcctcggcgagcacatggaacgggttggcatggattgtaggcgccgccctataccttgtctgcctccccgcgttgcgtcgcggtgcatggagccgggccacctcgacctgaatggaagccggcggcacctcgctaacggattcaccactccaagaattggagccaatcaattcttgcggagaactgtgaatgcgcaaaccaacccttggcagaacatatccatcgcgtccgccatctccagcagccgcacgcggcgcatctcgggcagcgttgggtcctggccacgggtgcgcatgatcgtgctcctgtcgttgaggacccggctaggctggcggggttgccttactggttagcagaatgaatcaccgatacgcgagcgaacgtgaagcgactgctgctgcaaaacgtctgcgacctgagcaacaacatgaatggtcttcggtttccgtgtttcgtaaagtctggaaacgcggaagtcagcgccctgcaccattatgttccggatctgcatcgcaggatgctgctggctaccctgtggaacacctacatctgtattaacgaagcgctggcattgaccctgagtgatttttctctggtcccgccgcatccataccgccagttgtttaccctcacaacgttccagtaaccgggcatgttcatcatcagtaacccgtatcgtgagcatcctctctcgtttcatcggtatcattacccccatgaacagaaatcccccttacacggaggcatcagtgaccaaacaggaaaaaaccgcccttaacatggcccgctttatcagaagccagacattaacgcttctggagaaactcaacgagctggacgcggatgaacaggcagacatctgtgaatcgcttcacgaccacgctgatgagctttaccgcagctgcctcgcgcgtttcggtgatgacggtgaaaacctctgacacatgcagctcccggagacggtcacagcttgtctgtaagcggatgccgggagcagacaagcccgtcagggcgcgtcagcgggtgttggcgggtgtcggggcgcagccatgacccagtcacgtagcgatagcggagtgtatactggcttaactatgcggcatcagagcagattgtactgagagtgcaccatatgcggtgtgaaataccgcacagatgcgtaaggagaaaataccgcatcaggcgctcttccgcttcctcgctcactgactcgctgcgctcggtcgttcggctgcggcgagcggtatcagctcactcaaaggcggtaatacggttatccacagaatcaggggataacgcaggaaagaacatgtgagcaaaaggccagcaaaaggccaggaaccgtaaaaaggccgcgttgctggcgtttttccataggctccgcccccctgacgagcatcacaaaaatcgacgctcaagtcagaggtggcgaaacccgacaggactataaagataccaggcgtttccccctggaagctccctcgtgcgctctcctgttccgaccctgccgcttaccggatacctgtccgcctttctcccttcgggaagcgtggcgctttctcatagctcacgctgtaggtatctcagttcggtgtaggtcgttcgctccaagctgggctgtgtgcacgaaccccccgttcagcccgaccgctgcgccttatccggtaactatcgtcttgagtccaacccggtaagacacgacttatcgccactggcagcagccactggtaacaggattagcagagcgaggtatgtaggcggtgctacagagttcttgaagtggtggcctaactacggctacactagaaggacagtatttggtatctgcgctctgctgaagccagttaccttcggaaaaagagttggtagctcttgatccggcaaacaaaccaccgctggtagcggtggtttttttgtttgcaagcagcagattacgcgcagaaaaaaaggatctcaagaagatcctttgatcttttctacggggtctgacgctcagtggaacgaaaactcacgttaagggattttggtcatgagattatcaaaaaggatcttcacctagatccttttaaattaaaaatgaagttttaaatcaatctaaagtatatatgagtaaacttggtctgacagttaccaatgcttaatcagtgaggcacctatctcagcgatctgtctatttcgttcatccatagttgcctgactccccgtcgtgtagataactacgatacgggagggcttaccatctggccccagtgctgcaatgataccgcgagacccacgctcaccggctccagatttatcagcaataaaccagccagccggaagggccgagcgcagaagtggtcctgcaactttatccgcctccatccagtctattaattgttgccgggaagctagagtaagtagttcgccagttaatagtttgcgcaacgttgttgccattgctgcaggtcgggagcacaggatgacgcctaacaattcattcaagccgacaccgcttcgcggcgcggcttaattcaggagttaaacatcatgagggaagcggtgatcgccgaagtatcgactcaactatcagaggtagttggcgtcatcgagcgccatctcgaaccgacgttgctggccgtacatttgtacggctccgcagtggatggcggcctgaagccacacagtgatattgatttgctggttacggtgaccgtaaggcttgatgaaacaacgcggcgagctttgatcaacgaccttttggaaacttcggcttcccctggagagagcgagattctccgcgctgtagaagtcaccattgttgtgcacgacgacatcattccgtggcgttatccagctaagcgcgaactgcaatttggagaatggcagcgcaatgacattcttgcaggtatcttcgagccagccacgatcgacattgatctggctatcttgctgacaaaagcaagagaacatagcgttgccttggtaggtccagcggcggaggaactctttgatccggttcctgaacaggatctatttgaggcgctaaatgaaaccttaacgctatggaactcgccgcccgactgggctggcgatgagcgaaatgtagtgcttacgttgtcccgcatttggtacagcgcagtaaccggcaaaatcgcgccgaaggatgtcgctgccgactgggcaatggagcgcctgccggcccagtatcagcccgtcatacttgaagctaggcaggcttatcttggacaagaagatcgcttggcctcgcgcgcagatcagttggaagaatttgttcactacgtgaaaggcgagatcaccaaggtagtcggcaaataatgtctaacaattcgttcaagccgacgccgcttcgcggcgcggcttaactcaagcgttagatgctgcaggcatcgtggtgtcacgctcgtcgtttggtatggcttcattcagctccggttcccaacgatcaaggcgagttacatgatcccccatgttgtgcaaaaaagcggttagctccttcggtcctccgatcg

SEQ ID NO: 36446 - DNA, 14023 bp, Artificial sequence
  Synthetic construct
aggatttttcggcgctgcgctacgtccgcgaccgcgttgagggatcaagccacagcagcccactcgaccttctagccgacccagacgagccaagggatctttttggaatgctgctccgtcgtcaggctttccgacgtttgggtggttgaacagaagtcattatcgcacggaatgccaagcactcccgaggggaaccctgtggttggcatgcacatacaaatggacgaacggataaaccttttcacgcccttttaaatatccgattattctaataaacgctcttttctcttaggtttacccgccaatatatcctgtcaaacactgatagtttaaactgaaggcgggaaacgacaatctgatccccatcaagctagcttctgcaggtcctgctcgagcggccgctcgaggtcattcatatgcttgagaagagagtcgggatagtccaaaataaaacaaaggtaagattacctggtcaaaagtgaaaacatcagttaaaaggtggtataaagtaaaatatcggtaataaaaggtggcccaaagtgaaatttactcttttctactattataaaaattgaggatgtttttgtcggtactttgatacgtcatttttgtatgaattggtttttaagtttattcgcttttggaaatgcatatctgtatttgagtcgggttttaagttcgtttgcttttgtaaatacagagggatttgtataagaaatatctttagaaaaacccatatgctaatttgacataatttttgagaaaaatatatattcaggcgaattctcacaatgaacaataataagattaaaatagctttcccccgttgcagcgcatgggtattttttctagtaaaaataaaagataaacttagactcaaaacatttacaaaaacaacccctaaagttcctaaagcccaaagtgctatccacgatccatagcaagcccagcccaacccaacccaacccaacccaccccagtccagccaactggacaatagtctccacacccccccactatcaccgtgagttgtccgcacgcaccgcacgtctcgcagccaaaaaaaaaaagaaagaaaaaaaagaaaaagaaaaaacagcaggtgggtccgggtcgtgggggccggaaacgcgaggaggatcgcgagccagcgacgaggccggccctccctccgcttccaaagaaacgccccccatcgccactatatacatacccccccctctcctcccatccccccaaccctaccaccaccaccaccaccacctccacctcctcccccctcgctgccggacgacgagctcctcccccctccccctccgccgccgccgcgccggtaaccaccccgcccctctcctctttctttctccgtttttttttccgtctcggtctcgatctttggccttggtagtttgggtgggcgagaggcggcttcgtgcgcgcccagatcggtgcgcgggaggggcgggatctcgcggctggggctctcgccggcgtggatccggcccggatctcgcggggaatggggctctcggatgtagatctgcgatccgccgttgttgggggagatgatggggggtttaaaatttccgccgtgctaaacaagatcaggaagaggggaaaagggcactatggtttatatttttatatatttctgctgcttcgtcaggcttagatgtgctagatctttctttcttctttttgtgggtagaatttgaatccctcagcattgttcatcggtagtttttcttttcatgatttgtgacaaatgcagcctcgtgcggagcttttttgtaggtagaagtgatcaaccgtcgacggtaccgagctcgaattctgcatgcgtttggacgtatgctcattcaggttggagccaatttggttgatgtgtgtgcgagttcttgcgagtctgatgagacatctctgtattgtgtttctttccccagtgttttctgtacttgtgtaatcggctaatcgccaacagattcggcgatgaataaatgagaaataaattgttctgattttgagtgcaaaaaaaaaggaattagatcgcgatcgcaagggcgaattctgcagatatccatcacactggcggccgcgcgatcgcatttaaatggcccgtagggcccctgcaggtactcgaggtcattcatatgcttgagaagagagtcgggatagtccaaaataaaacaaaggtaagattacctggtcaaaagtgaaaacatcagttaaaaggtggtataaagtaaaatatcggtaataaaaggtggcccaaagtgaaatttactcttttctactattataaaaattgaggatgtttttgtcggtactttgatacgtcatttttgtatgaattggtttttaagtttattcgcttttggaaatgcatatctgtatttgagtcgggttttaagttcgtttgcttttgtaaatacagagggatttgtataagaaatatctttagaaaaacccatatgctaatttgacataatttttgagaaaaatatatattcaggcgaattctcacaatgaacaataataagattaaaatagctttcccccgttgcagcgcatgggtattttttctagtaaaaataaaagataaacttagactcaaaacatttacaaaaacaacccctaaagttcctaaagcccaaagtgctatccacgatccatagcaagcccagcccaacccaacccaacccaacccaccccagtccagccaactggacaatagtctccacacccccccactatcaccgtgagttgtccgcacgcaccgcacgtctcgcagccaaaaaaaaaaagaaagaaaaaaaagaaaaagaaaaaacagcaggtgggtccgggtcgtgggggccggaaacgcgaggaggatcgcgagccagcgacgaggagcttaggcctcatcgttgaagatgcctctgccgacagtggtcccaaagatggacccccacccacgaggagcatcgtggaaaaagaagacgttccaaccacgtcttcaaagcaagtggattgatgtgatatctccactgacgtaagggatgacgcacaatcccactatccttcgaggcctcatcgttgaagatgcctctgccgacagtggtcccaaagatggacccccacccacgaggagcatcgtggaaaaagaagacgttccaaccacgtcttcaaagcaagtggattgatgtgatatctccactgacgtaagggatgacgcacaatcccactatccttcgaagctccctccctccgcttccaaagaaacgccccccatcgccactatatacatacccccccctctcctcccatccccccaacccttctagaaccatcttccacacactcaagccacactattggagaacacacagggacaacacaccataagatccaagggaggcctccgccgccgccggtaaccaccccgcccctctcctctttctttctccgtttttttttccgtctcggtctcgatctttggccttggtagtttgggtgggcgagaggcggcttcgtgcgcgcccagatcggtgcgcgggaggggcgggatctcgcggctggggctctcgccggcgtggatccggcccggatctcgcggggaatggggctctcggatgtagatctgcgatccgccgttgttgggggagatgatggggggtttaaaatttccgccgtgctaaacaagatcaggaagaggggaaaagggcactatggtttatatttttatatatttctgctgcttcgtcaggcttagatgtgctagatctttctttcttctttttgtgggtagaatttgaatccctcagcattgttcatcggtagtttttcttttcatgatttgtgacaaatgcagcctcgtgcggagcttttttgtaggtagaagcggaccggtaccgggcccgggggatccactagttctagctatatcatcaatttatgtattacacataatatcgcactcagtctttcatctacggcaatgtaccagctgatataatcagttattgaaatatttctgaatttaaacttgcatcaataaatttatgtttttgcttggactataatacctgacttgttattttatcaataaatatttaaactatatttctttcaagatatcattctttacaagtatacgtgtttaaattgaataccataaatttttatttttcaaatacatgtaaaattatgaaatgggagtggtggcgaccgagctcaagcacacttcaattcctataacggaccaaatcgcaaaaattataataacatattatttcatcctggattaaaagaaagtcaccggggattattttgtgacgccgattacatacggcgacaataaagacattggaaatcgtagtacatattggaatacactgattatattaatgatgaatacatactttaatatccttacgtaggatcgatccgttaattaaagcttgcctcgagacaacaacatgcttctcatcaacatggagggaagagggagggagaaagtgtcgcctggtcacctccattgtcacactagccactggccagctctcccacaccaccaatgccaggggcgagctttagcacagccaccgcttcacctccaccaccgcactaccctagcttcgcccaacagccaccgtcaacgcctcctctccgtcaacataagagagagagagaagaggagagtagccatgtggggaggaggaatagtacatggggcctaccgtttggcaagttattttgggttgccaagttaggccaataaggggagggatttggccatccggttggaaaggttattggggtagtatctttttactagaattgtcaaaaaaaaatagtttgagagccatttggagaggatgttgcctgttagaggtgctcttaggacatcaaattccataaaaacatcagaaaaattctctcgatgaagatttataaccactaaaactgccctcaattcgaagggagttcaaaacaattaaaatcatgttcgaattgagtttcaatttcactttaacccctttgaaatctcaatggtaaaacatcaacccgtcaggtagcatggttctttttattcctttcaaaaagagttaattacaaacagaatcaaaactaacagttaggcccaaggcccatccgagcaaacaatagatcatgggccaggcctgccaccaccctccccctcctggctcccgctcttgaatttcaaaatccaaaaatatcggcacgactggccgccgacggagcgggcggaaaatgacggaacaacccctcgaattctaccccaactacgcccaccaacccacacgccactgacaatccggtcccacccttgtgggcccacctacaagcgagacgtcagtcgctcgcagcaaccagtgggcccacctcccagtgagcggcgggtagatctggactcttacccacccacactaaacaaaacggcatgaatattttgcactaaaaccctcagaaaaattccgatattccaaaccagtacagttcctgaccgttggaggagccaaagtggagcggagtgtaaaattgggaaacttaatcgagggggttaaacgcaaaaacgccgaggcgcctcccgctctatagaaaggggaggagtgggaggtggaaaccctaccacaccgcagagaaaggcgtcttcgtactcgcctctctccgcgccctcctccgccgccgctcgccgccgttcgtctccgccgccaccggctagccatccaggtaaaacaaacaaaaacggatctgatgcttccattcctccgtttctcgtagtagcgcgcttcgatctgtgggtggatctgggtgatcctggggtgtggttcgttctgtttgatagatctgtcggtggatctggccttctgtggttgtcgatgtccggatctgcgttttgatcagtggtagttcgtggatctggcgaaatgttttggatctggcagtgagacgctaagaatcgggaaatgatgcaatattaggggggtttcggatggggatccactgaattagtctgtctccctgctgataatctgttcctttttggtagatctggttagtgtatgtttgtttcggatagatctgatcaatgcttgtttgttttttcaaattttctacctaggttgtataggaatggcatgcggatctggttggattgccatgatccgtgctgaaatgcccctttggttgatggatcttgatattttactgctgttcacctagatttgtactcccgtttatacttaatttgttgcttattatgaatagatctgtaacttaggcacatgtatggacggagtatgtggatctgtagtatgtacattgctgcgagctaagaactatttcagagcaagcacagaaaaaaatatttagacagattgggcaactatttgatggtctttggtatcatgctttgtagtgctcgtttctgcgtagtaatcttttgatctgatctgaagataggtgctattatattcttaaaggtcattagaacgctatctgaaaggctgtattatgtggattggttcacctgtgactccctgttcgtcttgtcttgataaatcctgtgataaaaaaaattcttaaggcgtaatttgttgaaatcttgttttgtcctatgcagcctgatccatggcggcactggtgacctcccagctcgcgacaagcggcaccgtcctgtcggtgacggaccgcttccggcgtcccggcttccagggactgaggccacggaacccagccgatgccgctctcgggatgaggacggtgggcgcgtccgcggctcccaagcagagcaggaagccacaccgtttcgaccgccggtgcttgagcatggtcgtctgcatgctacacggtgcaagcagccggccggcaaccgctcgcaaatcttccggcctttcgggaacggtcaggattccgggcgataagtccatatcccaccggtcgttcatgttcggcggtcttgccagcggtgagacgcgcatcacgggcctgcttgaaggtgaggacgtgatcaataccgggaaggccatgcaggctatgggagcgcgtatccgcaaggaaggtgacacatggatcattgacggcgttgggaatggcggtctgctcgcccctgaggcccctctcgacttcggcaatgcggcgacgggctgcaggctcactatgggactggtcggggtgtacgacttcgatagcacgttcatcggagacgcctcgctcacaaagcgcccaatgggccgcgttctgaacccgttgcgcgagatgggcgtacaggtcaaatccgaggatggtgaccgtttgcccgttacgctgcgcgggccgaagacgcctaccccgattacctaccgcgtgccaatggcatccgcccaggtcaagtcagccgtgctcctcgccggactgaacactccgggcatcaccacggtgatcgagcccatcatgaccagggatcataccgaaaagatgcttcaggggtttggcgccaacctgacggtcgagacggacgctgacggcgtcaggaccatccgccttgagggcaggggtaaactgactggccaagtcatcgatgttccgggagacccgtcgtccacggccttcccgttggttgcggcgctgctcgtgccggggagtgacgtgaccatcctgaacgtcctcatgaacccgaccaggaccggcctgatcctcacgcttcaggagatgggagccgacatcgaggtgatcaacccgcgcctggcaggcggtgaagacgttgcggatctgcgcgtgcgctcctctaccctgaagggcgtgacggtcccggaagatcgcgcgccgtccatgatagacgagtatcctattctggccgtcgccgctgcgttcgccgaaggggccacggtcatgaacggtcttgaggaactccgcgtgaaggaatcggatcgcctgtcggcggtggccaatggcctgaagctcaacggtgttgactgcgacgagggtgagacctcactcgtggtccgtggccggcctgatggcaagggcctcggcaacgccagtggagcggccgtcgccacgcacctcgatcatcgcatcgcgatgtccttcttggtgatgggtctcgtctcagagaacccggtgaccgtcgatgacgccacgatgatagcgacgagcttcccagagttcatggatctgatggcgggcctcggggccaagatcgaactgtctgacacgaaggccgcttgagctccagggttcttgcctggtgccttggcaatgcttgattactgctgctatcctatgatctgtccgtgtgggcttctatctatcagtttgtgtgtctggttttgaaaaacatttgcttttcgattatgtagggtttgcttgtagctttcgctgctgtgacctgtgttgtttatgtgaaccttctttgtggcatctttaatatccaagttcgtggtttgtcgtaaaacgaagcctctacttcgtaaagttgtgtctatagcattgaaatcgtttttttgctcgagaataattgtgacctttagttggcgtgaaactagttttggatatctgattctctggttcgcaatcttgagatcgtcgctgcttaggtgagctaagtgatgttcctaagtaaatgctcctcaccagaatacgtagctgtgtgaaaagagaacgcgtgaatacgtagctgtgtaaagattgtgtcccaagtaaacctcagtgatttttgtttggatttttaatttagaaacattcgactgggagcggctagagccacacccaagttcctaactatgataaagttgctctgtaacagaaaacaccatctagggcgcgccaaatcgtgaagtttctcatctaagcccccatttggacgtgaatgtagacacgtcgaaataaagatttccgaattagaataatttgtttattgctttcgcctataaatacgacggatcgtaatttgtcgttttatcaaaatgtactttcattttataataacgctgcggacatctacatttttgaattgaaaaaaaattggtaattactctttctttttctccatattgaccatcatactcattgctgatccatgtagatttcccggacatgaagccatttacaattgaatatatcctgccgccgctgccgctttgcacccggtggagcttgcatgttggtttctacgcagaactgagccggttaggcagataatttccattgagaactgagccatgtgcaccttccccccaacacggtgagcgacggggcaacggagtgatccacatgggacttttcctagcttggctgccatttttggggtgaggccgttcgcggccgaggggcgcagcccctggggggatgggaggcccgcgttagcgggccgggagggttcgagaagggggggcaccccccttcggcgtgcgcggtcacgcgcacagggcgcagccctggttaaaaacaaggtttataaatattggtttaaaagcaggttaaaagacaggttagcggtggccgaaaaacgggcggaaacccttgcaaatgctggattttctgcctgtggacagcccctcaaatgtcaataggtgcgcccctcatctgtcagcactctgcccctcaagtgtcaaggatcgcgcccctcatctgtcagtagtcgcgcccctcaagtgtcaataccgcagggcacttatccccaggcttgtccacatcatctgtgggaaactcgcgtaaaatcaggcgttttcgccgatttgcgaggctggccagctccacgtcgccggccgaaatcgagcctgcccctcatctgtcaacgccgcgccgggtgagtcggcccctcaagtgtcaacgtccgcccctcatctgtcagtgagggccaagttttccgcgaggtatccacaacgccggcggccggccgcggtgtctcgcacacggcttcgacggcgtttctggcgcgtttgcagggccatagacggccgccagcccagcggcgagggcaaccagcccggtgagcgtcggaaagggtcgatcgaccgatgcccttgagagccttcaacccagtcagctccttccggtgggcgcggggcatgactatcgtcgccgcacttatgactgtcttctttatcatgcaactcgtaggacaggtgccggcagcgctctgggtcattttcggcgaggaccgctttcgctggagcgcgacgatgatcggcctgtcgcttgcggtattcggaatcttgcacgccctcgctcaagccttcgtcactggtcccgccaccaaacgtttcggcgagaagcaggccattatcgccggcatggcggccgacgcgctgggctacgtcttgctggcgttcgcgacgcgaggctggatggccttccccattatgattcttctcgcttccggcggcatcgggatgcccgcgttgcaggccatgctgtccaggcaggtagatgacgaccatcagggacagcttcaaggatcgctcgcggctcttaccagcctaacttcgatcattggaccgctgatcgtcacggcgatttatgccgcctcggcgagcacatggaacgggttggcatggattgtaggcgccgccctataccttgtctgcctccccgcgttgcgtcgcggtgcatggagccgggccacctcgacctgaatggaagccggcggcacctcgctaacggattcaccactccaagaattggagccaatcaattcttgcggagaactgtgaatgcgcaaaccaacccttggcagaacatatccatcgcgtccgccatctccagcagccgcacgcggcgcatctcgggcagcgttgggtcctggccacgggtgcgcatgatcgtgctcctgtcgttgaggacccggctaggctggcggggttgccttactggttagcagaatgaatcaccgatacgcgagcgaacgtgaagcgactgctgctgcaaaacgtctgcgacctgagcaacaacatgaatggtcttcggtttccgtgtttcgtaaagtctggaaacgcggaagtcagcgccctgcaccattatgttccggatctgcatcgcaggatgctgctggctaccctgtggaacacctacatctgtattaacgaagcgctggcattgaccctgagtgatttttctctggtcccgccgcatccataccgccagttgtttaccctcacaacgttccagtaaccgggcatgttcatcatcagtaacccgtatcgtgagcatcctctctcgtttcatcggtatcattacccccatgaacagaaatcccccttacacggaggcatcagtgaccaaacaggaaaaaaccgcccttaacatggcccgctttatcagaagccagacattaacgcttctggagaaactcaacgagctggacgcggatgaacaggcagacatctgtgaatcgcttcacgaccacgctgatgagctttaccgcagctgcctcgcgcgtttcggtgatgacggtgaaaacctctgacacatgcagctcccggagacggtcacagcttgtctgtaagcggatgccgggagcagacaagcccgtcagggcgcgtcagcgggtgttggcgggtgtcggggcgcagccatgacccagtcacgtagcgatagcggagtgtatactggcttaactatgcggcatcagagcagattgtactgagagtgcaccatatgcggtgtgaaataccgcacagatgcgtaaggagaaaataccgcatcaggcgctcttccgcttcctcgctcactgactcgctgcgctcggtcgttcggctgcggcgagcggtatcagctcactcaaaggcggtaatacggttatccacagaatcaggggataacgcaggaaagaacatgtgagcaaaaggccagcaaaaggccaggaaccgtaaaaaggccgcgttgctggcgtttttccataggctccgcccccctgacgagcatcacaaaaatcgacgctcaagtcagaggtggcgaaacccgacaggactataaagataccaggcgtttccccctggaagctccctcgtgcgctctcctgttccgaccctgccgcttaccggatacctgtccgcctttctcccttcgggaagcgtggcgctttctcatagctcacgctgtaggtatctcagttcggtgtaggtcgttcgctccaagctgggctgtgtgcacgaaccccccgttcagcccgaccgctgcgccttatccggtaactatcgtcttgagtccaacccggtaagacacgacttatcgccactggcagcagccactggtaacaggattagcagagcgaggtatgtaggcggtgctacagagttcttgaagtggtggcctaactacggctacactagaaggacagtatttggtatctgcgctctgctgaagccagttaccttcggaaaaagagttggtagctcttgatccggcaaacaaaccaccgctggtagcggtggtttttttgtttgcaagcagcagattacgcgcagaaaaaaaggatctcaagaagatcctttgatcttttctacggggtctgacgctcagtggaacgaaaactcacgttaagggattttggtcatgagattatcaaaaaggatcttcacctagatccttttaaattaaaaatgaagttttaaatcaatctaaagtatatatgagtaaacttggtctgacagttaccaatgcttaatcagtgaggcacctatctcagcgatctgtctatttcgttcatccatagttgcctgactccccgtcgtgtagataactacgatacgggagggcttaccatctggccccagtgctgcaatgataccgcgagacccacgctcaccggctccagatttatcagcaataaaccagccagccggaagggccgagcgcagaagtggtcctgcaactttatccgcctccatccagtctattaattgttgccgggaagctagagtaagtagttcgccagttaatagtttgcgcaacgttgttgccattgctgcaggtcgggagcacaggatgacgcctaacaattcattcaagccgacaccgcttcgcggcgcggcttaattcaggagttaaacatcatgagggaagcggtgatcgccgaagtatcgactcaactatcagaggtagttggcgtcatcgagcgccatctcgaaccgacgttgctggccgtacatttgtacggctccgcagtggatggcggcctgaagccacacagtgatattgatttgctggttacggtgaccgtaaggcttgatgaaacaacgcggcgagctttgatcaacgaccttttggaaacttcggcttcccctggagagagcgagattctccgcgctgtagaagtcaccattgttgtgcacgacgacatcattccgtggcgttatccagctaagcgcgaactgcaatttggagaatggcagcgcaatgacattcttgcaggtatcttcgagccagccacgatcgacattgatctggctatcttgctgacaaaagcaagagaacatagcgttgccttggtaggtccagcggcggaggaactctttgatccggttcctgaacaggatctatttgaggcgctaaatgaaaccttaacgctatggaactcgccgcccgactgggctggcgatgagcgaaatgtagtgcttacgttgtcccgcatttggtacagcgcagtaaccggcaaaatcgcgccgaaggatgtcgctgccgactgggcaatggagcgcctgccggcccagtatcagcccgtcatacttgaagctaggcaggcttatcttggacaagaagatcgcttggcctcgcgcgcagatcagttggaagaatttgttcactacgtgaaaggcgagatcaccaaggtagtcggcaaataatgtctaacaattcgttcaagccgacgccgcttcgcggcgcggcttaactcaagcgttagatgctgcaggcatcgtggtgtcacgctcgtcgtttggtatggcttcattcagctccggttcccaacgatcaaggcgagttacatgatcccccatgttgtgcaaaaaagcggttagctccttcggtcctccgatcg

SEQ ID NO: 36447 - protein, 368 aa, Artificial sequence
  Consensus sequence of seq. id no. 311 and its homologs
  misc_feature (1)..(1): Met or Absent
  misc_feature (2)..(2): Ala or Absent
  misc_feature (3)..(3): Ala or Absent or Gln
  misc_feature (4)..(4): Arg or Absent or Pro
  misc_feature (5)..(5): Pro or Absent
  misc_feature (6)..(6): Asp or Absent or Gly
  misc_feature (7)..(7): Ala or Absent
  misc_feature (8)..(8): Arg or Absent or Asp
  misc_feature (9)..(9): Ser or Absent or Cys
  misc_feature (10)..(10): Gly or Absent or Met
  misc_feature (11)..(11): Tyr or Absent or Phe
  misc_feature (12)..(12): Cys or Absent or Ser
  misc_feature (13)..(13): Ala or Absent
  misc_feature (14)..(14): Ala or Absent or Met
  misc_feature (15)..(15): Thr or Absent or Leu
  misc_feature (16)..(16): Arg or Ser or Gly or Absent
  misc_feature (17)..(17): Thr or Val or Leu or Absent
  misc_feature (18)..(18): Phe or Leu or Cys or Absent
  misc_feature (19)..(19): Arg or Pro or Thr or Absent
  misc_feature (20)..(20): Ser or Trp or Leu or Absent
  misc_feature (21)..(21): Lys or Glu or Arg or Absent
  misc_feature (22)..(22): Arg or Ala or Met or Absent
  misc_feature (23)..(23): Ala or Cys or Trp or Absent
  misc_feature (24)..(24): Asp or Arg or Thr or Absent
  misc_feature (25)..(25): Val or Ser or Met or Absent
  misc_feature (26)..(26): Pro or Ser or Absent
  misc_feature (27)..(27): Leu or Asp or Thr or Absent
  misc_feature (28)..(28): Pro or His or Ala or Absent
  misc_feature (29)..(29): Ala or Ile or Leu or Absent
  misc_feature (30)..(30): Asp or Phe or Absent
  misc_feature (31)..(31): Ala or Leu or Ser or Absent
  misc_feature (32)..(32): Asp or Arg or Ser or Absent
  misc_feature (33)..(33): Leu or Absent or Tyr
  misc_feature (34)..(34): Asp or Absent or Ser
  misc_feature (35)..(35): Val or Absent or Phe
  misc_feature (36)..(36): Val or Absent or Ala
  misc_feature (37)..(37): Arg or Val or Leu or Absent
  misc_feature (38)..(38): Phe or Tyr or Leu
  misc_feature (39)..(39): Leu or Glu or Met or Ser
  misc_feature (40)..(40): Ala or Ser or Cys or Leu
  misc_feature (41)..(41): Ser or Glu or Ala or Arg
  misc_feature (42)..(42): Arg or Thr or Ser
  misc_feature (43)..(43): Arg or Gly or Thr or Cys
  misc_feature (44)..(44): His or Phe or Leu or Met
  misc_feature (45)..(45): Ala or Arg or Met or Ile
  misc_feature (46)..(46): Gly or Arg or Lys
  misc_feature (47)..(47): Val or Gly or Ser
  misc_feature (48)..(48): Val or Leu
  misc_feature (49)..(49): Ala or Ser or Phe
  misc_feature (50)..(50): Leu or Ser or Val
  misc_feature (51)..(51): Val or Trp or Ser or Tyr
  misc_feature (52)..(52): Asp or Glu or Val
  misc_feature (53)..(53): Ala or Pro or Arg or Ser
  misc_feature (54)..(54): Ala or Tyr or His or Ser
  misc_feature (55)..(55): Thr or Glu or Pro
  misc_feature (56)..(56): Gly or Tyr or Ser
  misc_feature (57)..(57): His or Ala or Val
  misc_feature (58)..(58): Arg or Met or Thr or Ser
  misc_feature (59)..(59): Val or Ala or Glu or Asn
  misc_feature (60)..(60): Thr or Glu or Gln
  misc_feature (61)..(61): Phe or Val or Ser or Ile
  misc_feature (62)..(62): Gln or Glu or Pro or Ala
  misc_feature (63)..(63): Glu or Ala or Gln or Ser
  misc_feature (64)..(64): Leu or Gln or Ser
  misc_feature (65)..(65): Trp or Gly or Ser or Asn
  misc_feature (66)..(66): Arg or Absent or Ser
  misc_feature (67)..(67): Absent or Thr
  misc_feature (68)..(68): Absent or Gln
  misc_feature (69)..(69): Absent or Pro
  misc_feature (70)..(70): Absent or Lys
  misc_feature (71)..(71): Absent or Ser
  misc_feature (72)..(72): Absent or Leu
  misc_feature (73)..(73): Absent or Ser
  misc_feature (74)..(74): Absent or Ser
  misc_feature (75)..(75): Absent or Trp
  misc_feature (76)..(76): Absent or Met
  misc_feature (77)..(77): Absent or Phe
  misc_feature (78)..(78): Absent or Leu
  misc_feature (79)..(79): Absent or Lys
  misc_feature (80)..(80): Absent or Ala
  misc_feature (81)..(81): Absent or Ser
  misc_feature (82)..(82): Absent or Leu or Thr
  misc_feature (83)..(83): Absent or Val or Ala
  misc_feature (84)..(84): Ala or Ser or Cys
  misc_feature (85)..(85): Val or Ile or Leu
  misc_feature (86)..(86): Glu or Arg or Ala
  misc_feature (87)..(87): Gly or Arg or Leu
  misc_feature (88)..(88): Ala or Glu or Ser or Leu
  misc_feature (89)..(89): Ala or Arg or Leu or Gln
  misc_feature (90)..(90): Thr or Arg or Ala
  misc_feature (91)..(91): Ala or Arg or Ser or Leu
  misc_feature (92)..(92): Leu or Phe or Ser
  misc_feature (93)..(93): Ala or Cys or Gly
  misc_feature (94)..(94): Ala or Gly or Ser or Glu
  misc_feature (95)..(95): Pro or Leu or Phe
  misc_feature (96)..(96): Pro or Arg or Met
  misc_feature (97)..(97): Leu or Thr or Ile
  misc_feature (99)..(99): Leu or Arg or Ile or Lys
  misc_feature (100)..(100): Arg or Asp or Absent
  misc_feature (101)..(101): Lys or Arg or Absent
  misc_feature (102)..(102): Gly or Leu or Ser or Absent
  misc_feature (103)..(103): Gln or Lys or Thr
  misc_feature (104)..(104): Val or Gln or Asp or Glu
  misc_feature (105)..(105): Ala or Gly or Ser or Lys
  misc_feature (106)..(106): Leu or Pro or Ala
  misc_feature (107)..(107): Ile or Arg or Gly or Ser
  misc_feature (108)..(108): Leu or Ser or Ala
  misc_feature (111)..(111): Asn or Trp or Ser
  misc_feature (112)..(112): Ser or Trp or Leu
  misc_feature (113)..(113): Val or Thr or Met
  misc_feature (114)..(114): His or Ala or Arg or Gly
  misc_feature (115)..(115): Phe or Ala or Leu or Val
  misc_feature (116)..(116): Pro or Ser or Asp
  misc_feature (117)..(117): Val or Arg or Thr or Ala
  misc_feature (118)..(118): Ala or Ser or Pro
  misc_feature (119)..(119): Thr or Arg or Pro or Ser
  misc_feature (120)..(120): Ile or Ala or Ser
  misc_feature (121)..(121): Gly or Trp or Thr or Asn
  misc_feature (122)..(122): Glu or Arg or Pro or Absent
  misc_feature (123)..(123): Ile or Lys or Ala or Absent
  misc_feature (124)..(124): Ser or Met or Absent
  misc_feature (125)..(125): Ala or Phe or Absent
  misc_feature (126)..(126): Thr or Met or Ile or Absent
  misc_feature (127)..(127): Pro or Arg or Absent
  misc_feature (128)..(128): Absent or Thr
  misc_feature (129)..(129): Absent or Ile
  misc_feature (130)..(130): Absent or Ser
  misc_feature (131)..(131): Absent or Met
  misc_feature (132)..(132): Absent or Met
  misc_feature (133)..(133): Absent or Ile
  misc_feature (134)..(134): Absent or Phe
  misc_feature (135)..(135): Absent or Thr
  misc_feature (136)..(136): Absent or Thr
  misc_feature (137)..(137): Absent or Met
  misc_feature (138)..(138): Absent or Ala
  misc_feature (139)..(139): Absent or Pro
  misc_feature (140)..(140): Absent or Ser
  misc_feature (141)..(141): Absent or Ser
  misc_feature (142)..(142): Absent or Arg
  misc_feature (143)..(143): Absent or Lys
  misc_feature (144)..(144): Absent or Phe
  misc_feature (145)..(145): Absent or Ser
  misc_feature (146)..(146): Absent or Leu
  misc_feature (147)..(147): Absent or Ser
  misc_feature (148)..(148): Absent or Ala
  misc_feature (149)..(149): Absent or Pro
  misc_feature (150)..(150): Absent or Cys
  misc_feature (151)..(151): Absent or Pro
  misc_feature (152)..(152): Absent or Trp or Val
  misc_feature (153)..(153): Absent or Arg or Val
  misc_feature (154)..(154): Absent or Arg or Ser
  misc_feature (155)..(155): Absent or Ile
  misc_feature (156)..(156): Absent or Arg or Ile
  misc_feature (157)..(157): Pro or Gly or Arg or Absent
  misc_feature (158)..(158): Asp or Ala or Cys
  misc_feature (159)..(159): Pro or Arg or Val or Ile
  misc_feature (160)..(160): Thr or Pro or Ser
  misc_feature (210)..(210): Absent or Arg
  misc_feature (211)..(211): Absent or Asp
  misc_feature (212)..(212): Absent or Ala
  misc_feature (213)..(213): Absent or Pro
  misc_feature (214)..(214): Absent or Asp
  misc_feature (215)..(215): Absent or Asp
  misc_feature (216)..(216): Absent or Gly
  misc_feature (217)..(217): Absent or Asp
  misc_feature (218)..(218): Absent or Asp
  misc_feature (219)..(219): Absent or Arg
  misc_feature (220)..(220): Absent or Ala
  misc_feature (221)..(221): Absent or Arg
  misc_feature (222)..(222): Absent or Arg
  misc_feature (223)..(223): Absent or Ala
  misc_feature (224)..(224): Absent or Gln
  misc_feature (225)..(225): Absent or Gly
  misc_feature (226)..(226): Absent or Glu
  misc_feature (227)..(227): Absent or Leu
  misc_feature (228)..(228): Absent or Leu
  misc_feature (229)..(229): Absent or Pro
  misc_feature (230)..(230): Absent or Arg
  misc_feature (231)..(231): Absent or Arg
  misc_feature (232)..(232): Absent or Arg
  misc_feature (233)..(233): Absent or Arg
  misc_feature (234)..(234): Absent or Leu
  misc_feature (235)..(235): Absent or His
  misc_feature (236)..(236): Absent or Gly
  misc_feature (237)..(237): Absent or Gly
  misc_feature (238)..(238): Absent or Glu
  misc_feature (239)..(239): Absent or Asp
  misc_feature (240)..(240): Absent or His
  misc_feature (241)..(241): Absent or His
  misc_feature (242)..(242): Absent or Asp
  misc_feature (243)..(243): Absent or Arg or Gly
  misc_feature (244)..(244): Absent or Pro or Tyr
  misc_feature (245)..(245): Absent or Cys or Asp
  misc_feature (246)..(246): Absent or Ser or Glu or Val
  misc_feature (247)..(247): Absent or Ser or Ala or Gly
  misc_feature (248)..(248): Absent or Tyr or Gly
  misc_feature (249)..(249): Absent or Ser or Arg or Thr
  misc_feature (250)..(250): Glu or Ser or Gly
  misc_feature (251)..(251): Ala or Ser or Gly or Ile
  misc_feature (252)..(252): Ser or Gly or Tyr
  misc_feature (253)..(253): Asp or Pro or Arg or Ser
  misc_feature (254)..(254): Arg or Ser or Gly
  misc_feature (255)..(255): Thr or Leu or Arg or His
  misc_feature (256)..(256): Glu or His or Lys
  misc_feature (257)..(257): Thr or Arg or Pro
  misc_feature (258)..(258): Phe or His or Trp
  misc_feature (259)..(259): Leu or Gln or Thr
  misc_feature (260)..(260): Cys or Pro or Gly
  misc_feature (261)..(261): Thr or Pro or Ser
  misc_feature (262)..(262): Val or Gly or Ala or Leu
  misc_feature (263)..(263): Pro or Ser or Gly or Leu
  misc_feature (264)..(264): Met or Ala or Ser
  misc_feature (265)..(265): Phe or Thr or Arg
  misc_feature (266)..(266): His or Arg or Leu
  misc_feature (267)..(267): Val or Arg or Leu
  misc_feature (269)..(269): Gly or Pro or Ala or Asp
  misc_feature (270)..(270): Leu or Pro or Ser
  misc_feature (271)..(271): Val or Arg or Pro or Glu
  misc_feature (272)..(272): Ala or Arg or Asp or Leu
  misc_feature (273)..(273): Phe or Gln or Gly or Ser
  misc_feature (274)..(274): Ala or Pro or Arg
  misc_feature (275)..(275): Thr or Trp or His or Gln
  misc_feature (276)..(276): Gly or Thr or Ser
  misc_feature (278)..(278): Leu or Gln
  misc_feature (279)..(279): Gly or Pro
  misc_feature (281)..(281): Gly or Ser or Gln
  misc_feature (282)..(282): Ala or Ser or Gly
  misc_feature (283)..(283): Thr or Lys or Gly
  misc_feature (284)..(284): Ile or Ser or Gly or Val
  misc_feature (285)..(285): Val or Lys or His or Gly
  misc_feature (286)..(286): Val or Thr or Tyr
  misc_feature (287)..(287): Leu or Thr or Cys or Phe
  misc_feature (289)..(289): Lys or Pro or Absent
  misc_feature (290)..(290): Tyr or Thr or Arg or Val
  misc_feature (291)..(291): Glu or Ser or Gly
  misc_feature (292)..(292): Leu or Phe or Tyr
  misc_feature (293)..(293): Pro or Ser or Glu or Ala
  misc_feature (294)..(294): Glu or Thr or Leu or Trp
  misc_feature (295)..(295): Met or Tyr or His or Arg
  misc_feature (296)..(296): Leu or Arg or Pro or Absent
  misc_feature (297)..(297): Arg or Asn or Gly or Absent
  misc_feature (298)..(298): Absent or Gly
  misc_feature (299)..(299): Absent or Gln
  misc_feature (300)..(300): Absent or Thr
  misc_feature (301)..(301): Absent or Phe
  misc_feature (302)..(302): Absent or Arg
  misc_feature (303)..(303): Absent or Leu
  misc_feature (304)..(304): Absent or Gly
  misc_feature (305)..(305): Absent or Ala
  misc_feature (306)..(306): Absent or Gly
  misc_feature (307)..(307): Absent or Arg
  misc_feature (308)..(308): Absent or Leu
  misc_feature (309)..(309): Absent or Arg
  misc_feature (310)..(310): Absent or Gly
  misc_feature (311)..(311): Absent or Leu
  misc_feature (312)..(312): Absent or Leu
  misc_feature (313)..(313): Absent or Lys or Ser
  misc_feature (314)..(314): Absent or Thr or Cys
  misc_feature (315)..(315): Absent or Leu or Arg
  misc_feature (316)..(316): Ala or Ser or Gly or Absent
  misc_feature (317)..(317): Ile or Leu or Met or Absent
  misc_feature (318)..(318): Asn or Ser or Absent
  misc_feature (319)..(319): Glu or Leu or Tyr or Absent
  misc_feature (320)..(320): Tyr or Ser or Gly
  misc_feature (321)..(321): Gly or His or Phe
  misc_feature (322)..(322): Val or Lys or Ile
  misc_feature (323)..(323): Thr or Ile or Gln
  misc_feature (324)..(324): Lys or Phe or Ser or Arg
  misc_feature (325)..(325): Tyr or Ile or His
  misc_feature (326)..(326): Cys or Trp or Gln or Leu
  misc_feature (327)..(327): Asp or Phe or Cys
  misc_feature (328)..(328): Arg or Pro or Cys or His
  misc_feature (329)..(329): Val or Arg or Thr or Ala
  misc_feature (330)..(330): Asn or His or Ala
  misc_feature (331)..(331): Ala or Pro or Val
  misc_feature (332)..(332): Leu or Thr or Gln or Glu
  misc_feature (334)..(334): Arg or Glu or Lys or Gln
  misc_feature (335)..(335): Tyr or Ser or Thr or Absent
  misc_feature (336)..(336): Leu or Ile or Absent
  misc_feature (337)..(337): Leu or Ser or Arg or Absent
  misc_feature (338)..(338): Pro or Leu or Arg or Absent
  misc_feature (339)..(339): His or Arg or Glu or Absent
  misc_feature (340)..(340): Ile or Leu or Ser or Absent
  misc_feature (341)..(341): Thr or Lys or Glu or Absent
  misc_feature (342)..(342): Asn or Asp or Ser or Absent
  misc_feature (343)..(343): Asn or Ser or Absent
  misc_feature (344)..(344): Ile or Gln or Arg or Absent
  misc_feature (345)..(345): Asn or Glu or His or Absent
  misc_feature (346)..(346): Thr or Asn or Gly or Absent
  misc_feature (347)..(347): His or Met or Pro or Absent
  misc_feature (348)..(348): His or Val or Absent
  misc_feature (349)..(349): Ser or Arg or Absent
  misc_feature (350)..(350): Arg or Ser or Absent
  misc_feature (351)..(351): Arg or Ser or Lys or Absent
  misc_feature (352)..(352): His or Ala or Cys or Absent
  misc_feature (353)..(353): Pro or Cys or Ala or Absent
  misc_feature (354)..(354): Leu or Phe or Ser or Absent
  misc_feature (355)..(355): Asp or Pro or Gln or Absent
  misc_feature (356)..(356): His or Arg or Absent
  misc_feature (357)..(357): Tyr or Glu or Ser or Absent
  misc_feature (358)..(358): Ser or Tyr or Thr or Absent
  misc_feature (359)..(359): His or Arg or Lys or Absent
  misc_feature (360)..(360): Thr or Absent or His
  misc_feature (361)..(361): Thr or Absent or Ala
  misc_feature (362)..(362): Asp or Absent or Val
  misc_feature (363)..(363): Absent or Leu
  misc_feature (364)..(364): Absent or Cys
  misc_feature (365)..(365): Absent or Ser
  misc_feature (366)..(366): Absent or Trp
  misc_feature (367)..(367): Absent or Trp
  misc_feature (368)..(368): Absent or Leu
  unsure (1)..(368): unsure at all Xaa locations
XXXXXXXXXXXXXXXXXXXXXXXXXXXXXXXXXXXXXXXXXXXXXXXXXXXXXXXXXXXXXXXXXXXXXXXXXXXXXXXXXXXXXXXXXXXXXXXXXSXXXXXXXXXXXXXXXXXXXXXXXXXXXXXXXXXXXXXXXXXXXXXXXXXXXXXXXXXXXXXXKYCDRVNALSRYLLPHITNNINTHHSRRHPLDHYSHTTDLLIHAAACRSXXXXXXXXXXXXXXXXXXXXXXXXXXXXXXXXXXXXXXXXXXXXXXXXXXXXXXXXXXXXXXXXXXXLXXCXXXXXXXSXXXXXXXXXXXXXXXXXXXXXXXXXXXXXXXXXXXXXXXXXXXXSXXXXXXXXXXXXXXXXXXXXXXXXXXXXXXXXXXX

SEQ ID NO: 36448 - protein, 1795 aa, Artificial sequence
  consensus sequence of seq id no: 314 and its homologs
  misc_feature (1)..(1): Absent or Met
  misc_feature (2)..(2): Absent or Asn
  misc_feature (3)..(3): Absent or Ser
  misc_feature (4)..(4): Absent or Ile
  misc_feature (5)..(5): Absent or Ser
  misc_feature (6)..(6): Absent or Ser
  misc_feature (7)..(7): Absent or Ser
  misc_feature (8)..(8): Absent or Ser
  misc_feature (9)..(9): Absent or Met
  misc_feature (10)..(10): Absent or Arg
  misc_feature (11)..(11): Absent or Arg
  misc_feature (12)..(12): Absent or Asn
  misc_feature (13)..(13): Absent or Trp
  misc_feature (14)..(14): Absent or Ile
  misc_feature (15)..(15): Absent or His
  misc_feature (16)..(16): Absent or Asp
  misc_feature (17)..(17): Absent or Val
  misc_feature (18)..(18): Absent or Phe
  misc_feature (19)..(19): Absent or Pro
  misc_feature (20)..(20): Absent or Ser
  misc_feature (21)..(21): Absent or Phe
  misc_feature (22)..(22): Absent or His
  misc_feature (23)..(23): Absent or Gly
  misc_feature (24)..(24): Absent or Ala
  misc_feature (25)..(25): Absent or Asp
  misc_feature (26)..(26): Absent or Val
  misc_feature (27)..(27): Absent or Arg
  misc_feature (28)..(28): Absent or Lys
  misc_feature (29)..(29): Absent or Ser
  misc_feature (30)..(30): Absent or Phe
  misc_feature (31)..(31): Absent or Leu
  misc_feature (32)..(32): Absent or Ser
  misc_feature (33)..(33): Absent or His
  misc_feature (34)..(34): Absent or Thr
  misc_feature (35)..(35): Absent or Leu
  misc_feature (36)..(36): Absent or Lys
  misc_feature (37)..(37): Absent or Glu
  misc_feature (38)..(38): Absent or Leu
  misc_feature (39)..(39): Absent or Arg
  misc_feature (40)..(40): Absent or Ser
  misc_feature (41)..(41): Absent or Lys
  misc_feature (42)..(42): Absent or Gly
  misc_feature (43)..(43): Absent or Ile
  misc_feature (44)..(44): Absent or Asp
  misc_feature (45)..(45): Absent or Leu
  misc_feature (46)..(46): Absent or Phe
  misc_feature (47)..(47): Absent or Ile
  misc_feature (48)..(48): Absent or Asp
  misc_feature (49)..(49): Absent or Asn
  misc_feature (50)..(50): Absent or Asp
  misc_feature (51)..(51): Absent or Ile
  misc_feature (52)..(52): Absent or Leu
  misc_feature (53)..(53): Absent or Arg
  misc_feature (54)..(54): Absent or Gly
  misc_feature (55)..(55): Absent or Glu
  misc_feature (56)..(56): Absent or Phe
  misc_feature (57)..(57): Absent or Ile
  misc_feature (58)..(58): Absent or Gly
  misc_feature (59)..(59): Absent or Pro
  misc_feature (60)..(60): Absent or Glu
  misc_feature (61)..(61): Absent or Leu
  misc_feature (62)..(62): Absent or Lys
  misc_feature (63)..(63): Absent or Lys
  misc_feature (64)..(64): Absent or Ala
  misc_feature (65)..(65): Absent or Ile
  misc_feature (66)..(66): Absent or His
  misc_feature (67)..(67): Absent or Gly
  misc_feature (68)..(68): Absent or Ser
  misc_feature (69)..(69): Absent or Arg
  misc_feature (70)..(70): Absent or Leu
  misc_feature (71)..(71): Absent or Ala
  misc_feature (72)..(72): Absent or Ile
  misc_feature (73)..(73): Absent or Val
  misc_feature (74)..(74): Absent or Leu
  misc_feature (75)..(75): Absent or Leu
  misc_feature (76)..(76): Absent or Ser
  misc_feature (77)..(77): Absent or Lys
  misc_feature (78)..(78): Absent or Arg
  misc_feature (79)..(79): Absent or Tyr
  misc_feature (80)..(80): Absent or Ala
  misc_feature (81)..(81): Absent or Ser
  misc_feature (82)..(82): Absent or Ser
  misc_feature (83)..(83): Absent or Ser
  misc_feature (84)..(84): Absent or Trp
  misc_feature (85)..(85): Absent or Cys
  misc_feature (86)..(86): Absent or Leu
  misc_feature (87)..(87): Absent or Asp
  misc_feature (88)..(88): Absent or Glu
  misc_feature (89)..(89): Absent or Leu
  misc_feature (90)..(90): Absent or Ala
  misc_feature (91)..(91): Absent or Glu
  misc_feature (92)..(92): Absent or Ile
  misc_feature (93)..(93): Absent or Met
  misc_feature (94)..(94): Absent or Lys
  misc_feature (95)..(95): Absent or Cys
  misc_feature (96)..(96): Absent or Lys
  misc_feature (97)..(97): Absent or Glu
  misc_feature (98)..(98): Absent or Ala
  misc_feature (99)..(99): Absent or Phe
  misc_feature (100)..(100): Absent or Gly
  misc_feature (101)..(101): Absent or Gln
  misc_feature (102)..(102): Absent or Thr
  misc_feature (103)..(103): Absent or Val
  misc_feature (104)..(104): Absent or Met
  misc_feature (105)..(105): Absent or Ala
  misc_feature (106)..(106): Absent or Ile
  misc_feature (107)..(107): Absent or Phe
  misc_feature (108)..(108): Absent or Tyr
  misc_feature (109)..(109): Absent or Glu
  misc_feature (110)..(110): Absent or Val
  misc_feature (111)..(111): Absent or Asp
  misc_feature (112)..(112): Absent or Pro
  misc_feature (113)..(113): Absent or Thr
  misc_feature (114)..(114): Absent or Asp
  misc_feature (115)..(115): Absent or Val
  misc_feature (116)..(116): Absent or Glu
  misc_feature (117)..(117): Absent or Lys
  misc_feature (118)..(118): Absent or Gln
  misc_feature (119)..(119): Absent or Thr
  misc_feature (120)..(120): Absent or Gly
  misc_feature (121)..(121): Absent or Gly
  misc_feature (122)..(122): Absent or Phe
  misc_feature (123)..(123): Absent or Gly
  misc_feature (124)..(124): Absent or Glu
  misc_feature (125)..(125): Absent or Val
  misc_feature (126)..(126): Absent or Phe
  misc_feature (127)..(127): Absent or Thr
  misc_feature (128)..(128): Absent or Glu
  misc_feature (129)..(129): Absent or Thr
  misc_feature (130)..(130): Absent or Cys
  misc_feature (131)..(131): Absent or Glu
  misc_feature (132)..(132): Absent or Gly
  misc_feature (133)..(133): Absent or Lys
  misc_feature (134)..(134): Absent or Thr
  misc_feature (135)..(135): Absent or Ala
  misc_feature (136)..(136): Absent or Glu
  misc_feature (137)..(137): Absent or Asp
  misc_feature (138)..(138): Absent or Ile
  misc_feature (139)..(139): Absent or Glu
  misc_feature (140)..(140): Absent or Lys
  misc_feature (141)..(141): Absent or Trp
  misc_feature (142)..(142): Absent or Ser
  misc_feature (143)..(143): Absent or Gln
  misc_feature (144)..(144): Absent or Ala
  misc_feature (145)..(145): Absent or Leu
  misc_feature (146)..(146): Absent or Ala
  misc_feature (147)..(147): Absent or Lys
  misc_feature (148)..(148): Absent or Val
  misc_feature (149)..(149): Absent or Ala
  misc_feature (150)..(150): Absent or Thr
  misc_feature (151)..(151): Absent or Val
  misc_feature (152)..(152): Absent or Thr
  misc_feature (153)..(153): Absent or Ser
  misc_feature (154)..(154): Absent or Tyr
  misc_feature (155)..(155): Absent or Leu
  misc_feature (156)..(156): Absent or Ser
  misc_feature (157)..(157): Absent or Ser
  misc_feature (158)..(158): Absent or Ser
  misc_feature (159)..(159): Absent or Trp
  misc_feature (160)..(160): Absent or Asp
  misc_feature (161)..(161): Absent or Thr
  misc_feature (162)..(162): Absent or Glu
  misc_feature (163)..(163): Absent or Thr
  misc_feature (164)..(164): Absent or Glu
  misc_feature (165)..(165): Absent or Met
  misc_feature (166)..(166): Absent or Ile
  misc_feature (167)..(167): Absent or Glu
  misc_feature (168)..(168): Absent or Glu
  misc_feature (169)..(169): Absent or Ile
  misc_feature (170)..(170): Absent or Ala
  misc_feature (171)..(171): Absent or Thr
  misc_feature (172)..(172): Absent or Asp
  misc_feature (173)..(173): Absent or Val
  misc_feature (174)..(174): Absent or Ser
  misc_feature (175)..(175): Absent or Asn
  misc_feature (176)..(176): Absent or Met
  misc_feature (177)..(177): Absent or Leu
  misc_feature (178)..(178): Absent or Thr
  misc_feature (179)..(179): Absent or Lys
  misc_feature (180)..(180): Absent or Ser
  misc_feature (181)..(181): Absent or Thr
  misc_feature (182)..(182): Absent or Gln
  misc_feature (183)..(183): Absent or Ser
  misc_feature (184)..(184): Absent or Arg
  misc_feature (185)..(185): Absent or Asp
  misc_feature (186)..(186): Absent or Phe
  misc_feature (187)..(187): Absent or Val
  misc_feature (188)..(188): Absent or Gly
  misc_feature (189)..(189): Absent or Ile
  misc_feature (190)..(190): Absent or Ile
  misc_feature (191)..(191): Absent or Gly
  misc_feature (192)..(192): Absent or Met
  misc_feature (193)..(193): Absent or Gly
  misc_feature (194)..(194): Absent or Ser
  misc_feature (195)..(195): Absent or His
  misc_feature (196)..(196): Absent or Met
  misc_feature (197)..(197): Absent or Glu
  misc_feature (198)..(198): Absent or Lys
  misc_feature (199)..(199): Absent or Met
  misc_feature (200)..(200): Absent or Lys
  misc_feature (201)..(201): Absent or Pro
  misc_feature (202)..(202): Absent or Leu
  misc_feature (203)..(203): Absent or Leu
  misc_feature (204)..(204): Absent or Cys
  misc_feature (205)..(205): Absent or Leu
  misc_feature (206)..(206): Absent or Glu
  misc_feature (207)..(207): Absent or Ser
  misc_feature (208)..(208): Absent or Glu
  misc_feature (209)..(209): Absent or Glu
  misc_feature (210)..(210): Absent or Val
  misc_feature (211)..(211): Absent or Arg
  misc_feature (212)..(212): Absent or Met
  misc_feature (213)..(213): Absent or Ile
  misc_feature (214)..(214): Absent or Gly
  misc_feature (215)..(215): Absent or Ile
  misc_feature (216)..(216): Absent or Trp
  misc_feature (217)..(217): Absent or Gly
  misc_feature (218)..(218): Absent or Pro
  misc_feature (219)..(219): Absent or Pro
  misc_feature (220)..(220): Absent or Gly
  misc_feature (221)..(221): Absent or Ile
  misc_feature (222)..(222): Absent or Gly
  misc_feature (223)..(223): Absent or Lys
  misc_feature (224)..(224): Absent or Thr
  misc_feature (225)..(225): Absent or Thr
  misc_feature (226)..(226): Absent or Ile
  misc_feature (227)..(227): Absent or Ala
  misc_feature (228)..(228): Absent or Arg
  misc_feature (229)..(229): Absent or Phe
  misc_feature (230)..(230): Absent or Leu
  misc_feature (231)..(231): Absent or Phe
  misc_feature (232)..(232): Absent or Asn
  misc_feature (233)..(233): Absent or Gln
  misc_feature (234)..(234): Absent or Leu
  misc_feature (235)..(235): Absent or Phe
  misc_feature (236)..(236): Absent or Gly
  misc_feature (237)..(237): Absent or Asn
  misc_feature (238)..(238): Absent or Phe
  misc_feature (239)..(239): Absent or Gly
  misc_feature (240)..(240): Absent or Leu
  misc_feature (241)..(241): Absent or Ile
  misc_feature (242)..(242): Absent or Val
  misc_feature (243)..(243): Absent or Phe
  misc_feature (244)..(244): Absent or Met
  misc_feature (245)..(245): Absent or Asp
  misc_feature (246)..(246): Absent or Asn
  misc_feature (247)..(247): Absent or Ile
  misc_feature (248)..(248): Absent or Lys
  misc_feature (249)..(249): Absent or Ala
  misc_feature (250)..(250): Absent or Met
  misc_feature (251)..(251): Absent or Tyr
  misc_feature (252)..(252): Absent or Thr
  misc_feature (253)..(253): Absent or Ile
  misc_feature (254)..(254): Absent or Pro
  misc_feature (255)..(255): Absent or Ile
  misc_feature (256)..(256): Absent or Gly
  misc_feature (257)..(257): Absent or Ser
  misc_feature (258)..(258): Absent or Asp
  misc_feature (259)..(259): Absent or Asp
  misc_feature (260)..(260): Absent or Tyr
  misc_feature (261)..(261): Absent or Ser
  misc_feature (262)..(262): Absent or Ala
  misc_feature (263)..(263): Absent or Lys
  misc_feature (264)..(264): Absent or Leu
  misc_feature (265)..(265): Absent or Asp
  misc_feature (266)..(266): Absent or Leu
  misc_feature (267)..(267): Absent or Gln
  misc_feature (268)..(268): Absent or Gln
  misc_feature (269)..(269): Absent or Lys
  misc_feature (270)..(270): Absent or Phe
  misc_feature (271)..(271): Absent or Met
  misc_feature (272)..(272): Absent or Ser
  misc_feature (273)..(273): Absent or Gln
  misc_feature (274)..(274): Absent or Ile
  misc_feature (275)..(275): Absent or Ile
  misc_feature (276)..(276): Absent or Asn
  misc_feature (277)..(277): Absent or Glu
  misc_feature (278)..(278): Absent or Lys
  misc_feature (279)..(279): Absent or Asp
  misc_feature (280)..(280): Absent or Ile
  misc_feature (281)..(281): Absent or Lys
  misc_feature (282)..(282): Absent or Ile
  misc_feature (283)..(283): Absent or Pro
  misc_feature (284)..(284): Absent or His
  misc_feature (285)..(285): Absent or Leu
  misc_feature (286)..(286): Absent or Gly
  misc_feature (287)..(287): Absent or Val
  misc_feature (288)..(288): Absent or Ala
  misc_feature (289)..(289): Absent or Gln
  misc_feature (290)..(290): Absent or Glu
  misc_feature (291)..(291): Absent or Arg
  misc_feature (292)..(292): Absent or Leu
  misc_feature (293)..(293): Absent or Lys
  misc_feature (294)..(294): Absent or Asp
  misc_feature (295)..(295): Absent or Glu
  misc_feature (296)..(296): Absent or Lys
  misc_feature (297)..(297): Absent or Val
  misc_feature (298)..(298): Absent or Leu
  misc_feature (299)..(299): Absent or Val
  misc_feature (300)..(300): Absent or Val
  misc_feature (301)..(301): Absent or Leu
  misc_feature (302)..(302): Absent or Asp
  misc_feature (303)..(303): Absent or Gly
  misc_feature (304)..(304): Absent or Val
  misc_feature (305)..(305): Absent or Asp
  misc_feature (306)..(306): Absent or Gln
  misc_feature (307)..(307): Absent or Leu
  misc_feature (308)..(308): Absent or Phe
  misc_feature (309)..(309): Absent or Gln
  misc_feature (310)..(310): Absent or Leu
  misc_feature (311)..(311): Absent or Glu
  misc_feature (312)..(312): Absent or Ala
  misc_feature (313)..(313): Absent or Met
  misc_feature (314)..(314): Absent or Ala
  misc_feature (315)..(315): Absent or Lys
  misc_feature (316)..(316): Absent or Glu
  misc_feature (317)..(317): Absent or Thr
  misc_feature (318)..(318): Absent or Arg
  misc_feature (319)..(319): Absent or Trp
  misc_feature (320)..(320): Absent or Phe
  misc_feature (321)..(321): Absent or Gly
  misc_feature (322)..(322): Absent or His
  misc_feature (323)..(323): Absent or Gly
  misc_feature (324)..(324): Absent or Ser
  misc_feature (325)..(325): Absent or Arg
  misc_feature (326)..(326): Absent or Ile
  misc_feature (327)..(327): Absent or Ile
  misc_feature (328)..(328): Absent or Ile
  misc_feature (329)..(329): Absent or Thr
  misc_feature (330)..(330): Absent or Thr
  misc_feature (331)..(331): Absent or Pro
  misc_feature (332)..(332): Absent or Asp
  misc_feature (333)..(333): Absent or Leu
  misc_feature (334)..(334): Absent or Lys
  misc_feature (335)..(335): Absent or Leu
  misc_feature (336)..(336): Absent or Leu
  misc_feature (337)..(337): Absent or Lys
  misc_feature (338)..(338): Absent or Ala
  misc_feature (339)..(339): Absent or His
  misc_feature (340)..(340): Absent or Gly
  misc_feature (341)..(341): Absent or Ile
  misc_feature (342)..(342): Absent or Thr
  misc_feature (343)..(343): Absent or His
  misc_feature (344)..(344): Absent or Ile
  misc_feature (345)..(345): Absent or Tyr
  misc_feature (346)..(346): Absent or Lys
  misc_feature (347)..(347): Absent or Val
  misc_feature (348)..(348): Absent or Asp
  misc_feature (349)..(349): Absent or Phe
  misc_feature (350)..(350): Absent or Pro
  misc_feature (351)..(351): Absent or Pro
  misc_feature (352)..(352): Absent or Pro
  misc_feature (353)..(353): Absent or Ala
  misc_feature (354)..(354): Absent or Glu
  misc_feature (355)..(355): Absent or Ala
  misc_feature (356)..(356): Absent or Leu
  misc_feature (357)..(357): Absent or Glu
  misc_feature (358)..(358): Absent or Ile
  misc_feature (359)..(359): Absent or Phe
  misc_feature (360)..(360): Absent or Cys
  misc_feature (361)..(361): Absent or Met
  misc_feature (362)..(362): Absent or Tyr
  misc_feature (363)..(363): Absent or Ala
  misc_feature (364)..(364): Absent or Phe
  misc_feature (365)..(365): Absent or Glu
  misc_feature (366)..(366): Absent or Gln
  misc_feature (367)..(367): Absent or Lys
  misc_feature (368)..(368): Absent or Ser
  misc_feature (369)..(369): Absent or Pro
  misc_feature (370)..(370): Absent or Lys
  misc_feature (371)..(371): Absent or Glu
  misc_feature (372)..(372): Absent or Gly
  misc_feature (373)..(373): Absent or Phe
  misc_feature (374)..(374): Absent or Glu
  misc_feature (375)..(375): Absent or Met
  misc_feature (376)..(376): Absent or Leu
  misc_feature (377)..(377): Absent or Ala
  misc_feature (378)..(378): Absent or Trp
  misc_feature (379)..(379): Absent or Glu
  misc_feature (380)..(380): Absent or Ala
  misc_feature (381)..(381): Absent or Thr
  misc_feature (382)..(382): Absent or Ile
  misc_feature (383)..(383): Absent or Leu
  misc_feature (384)..(384): Absent or Ala
  misc_feature (385)..(385): Absent or Cys
  misc_feature (386)..(386): Absent or Gln
  misc_feature (387)..(387): Absent or Leu
  misc_feature (388)..(388): Absent or Pro
  misc_feature (389)..(389): Absent or Leu
  misc_feature (390)..(390): Absent or Gly
  misc_feature (391)..(391): Absent or Leu
  misc_feature (392)..(392): Absent or Arg
  misc_feature (393)..(393): Absent or Val
  misc_feature (394)..(394): Absent or Ile
  misc_feature (395)..(395): Absent or Gly
  misc_feature (396)..(396): Absent or Ser
  misc_feature (397)..(397): Absent or Tyr
  misc_feature (398)..(398): Absent or Phe
  misc_feature (399)..(399): Absent or Arg
  misc_feature (400)..(400): Absent or Gly
  misc_feature (401)..(401): Absent or Lys
  misc_feature (402)..(402): Absent or Tyr
  misc_feature (403)..(403): Absent or Ser
  misc_feature (404)..(404): Absent or Lys
  misc_feature (405)..(405): Absent or Lys
  misc_feature (406)..(406): Absent or Met
  misc_feature (407)..(407): Absent or Trp
  misc_feature (408)..(408): Absent or Glu
  misc_feature (409)..(409): Absent or Glu
  misc_feature (410)..(410): Absent or Ala
  misc_feature (411)..(411): Absent or Leu
  misc_feature (412)..(412): Absent or Pro
  misc_feature (413)..(413): Absent or Glu
  misc_feature (414)..(414): Absent or Leu
  misc_feature (415)..(415): Absent or Arg
  misc_feature (416)..(416): Absent or Ser
  misc_feature (417)..(417): Absent or His
  misc_feature (418)..(418): Absent or Leu
  misc_feature (419)..(419): Absent or Asp
  misc_feature (420)..(420): Absent or Gly
  misc_feature (421)..(421): Absent or Glu
  misc_feature (422)..(422): Absent or Ile
  misc_feature (423)..(423): Absent or Glu
  misc_feature (424)..(424): Absent or Thr
  misc_feature (425)..(425): Absent or Val
  misc_feature (426)..(426): Absent or Leu
  misc_feature (427)..(427): Absent or Lys
  misc_feature (428)..(428): Absent or Phe
  misc_feature (429)..(429): Absent or Asn
  misc_feature (430)..(430): Absent or Tyr
  misc_feature (431)..(431): Absent or Asp
  misc_feature (432)..(432): Absent or Ala
  misc_feature (433)..(433): Absent or Leu
  misc_feature (434)..(434): Absent or Ser
  misc_feature (435)..(435): Absent or Glu
  misc_feature (436)..(436): Absent or Lys
  misc_feature (437)..(437): Absent or Asp
  misc_feature (438)..(438): Absent or Lys
  misc_feature (439)..(439): Absent or Ser
  misc_feature (440)..(440): Absent or Leu
  misc_feature (441)..(441): Absent or Phe
  misc_feature (442)..(442): Absent or Leu
  misc_feature (443)..(443): Absent or His
  misc_feature (444)..(444): Absent or Leu
  misc_feature (445)..(445): Absent or Thr
  misc_feature (446)..(446): Absent or Cys
  misc_feature (447)..(447): Absent or Phe
  misc_feature (448)..(448): Absent or Phe
  misc_feature (449)..(449): Absent or Asn
  misc_feature (450)..(450): Absent or Phe
  misc_feature (451)..(451): Absent or Gly
  misc_feature (452)..(452): Absent or Ser
  misc_feature (453)..(453): Absent or Ile
  misc_feature (454)..(454): Absent or Glu
  misc_feature (455)..(455): Absent or Asn
  misc_feature (456)..(456): Absent or Ile
  misc_feature (457)..(457): Absent or Glu
  misc_feature (458)..(458): Absent or Val
  misc_feature (459)..(459): Absent or Tyr
  misc_feature (460)..(460): Absent or Leu
  misc_feature (461)..(461): Absent or Ala
  misc_feature (462)..(462): Absent or Lys
  misc_feature (463)..(463): Absent or Thr
  misc_feature (464)..(464): Absent or Phe
  misc_feature (465)..(465): Absent or Ser
  misc_feature (466)..(466): Absent or Asp
  misc_feature (467)..(467): Absent or Phe
  misc_feature (468)..(468): Absent or Arg
  misc_feature (469)..(469): Absent or Gln
  misc_feature (470)..(470): Absent or Arg
  misc_feature (471)..(471): Absent or Leu
  misc_feature (472)..(472): Absent or Asp
  misc_feature (473)..(473): Absent or Leu
  misc_feature (474)..(474): Absent or Leu
  misc_feature (475)..(475): Absent or Val
  misc_feature (476)..(476): Absent or Glu
  misc_feature (477)..(477): Absent or Arg
  misc_feature (478)..(478): Absent or Phe
  misc_feature (479)..(479): Absent or Leu
  misc_feature (480)..(480): Absent or Ile
  misc_feature (481)..(481): Absent or Ser
  misc_feature (482)..(482): Absent or Ile
  misc_feature (483)..(483): Absent or Pro
  misc_feature (484)..(484): Absent or Gly
  misc_feature (485)..(485): Absent or Lys
  misc_feature (486)..(486): Absent or Arg
  misc_feature (487)..(487): Absent or Gln
  misc_feature (488)..(488): Absent or Phe
  misc_feature (489)..(489): Absent or Leu
  misc_feature (490)..(490): Absent or Val
  misc_feature (491)..(491): Absent or Ala
  misc_feature (492)..(492): Absent or Ala
  misc_feature (493)..(493): Absent or Gly
  misc_feature (494)..(494): Absent or Asp
  misc_feature (495)..(495): Absent or Ile
  misc_feature (496)..(496): Absent or Cys
  misc_feature (497)..(497): Absent or Gln
  misc_feature (498)..(498): Absent or Val
  misc_feature (499)..(499): Absent or Leu
  misc_feature (500)..(500): Absent or Ser
  misc_feature (501)..(501): Absent or Asp
  misc_feature (502)..(502): Absent or Asp
  misc_feature (503)..(503): Absent or Thr
  misc_feature (504)..(504): Absent or Ala
  misc_feature (505)..(505): Absent or Gly
  misc_feature (506)..(506): Absent or Ser
  misc_feature (507)..(507): Absent or Ser
  misc_feature (508)..(508): Absent or Thr
  misc_feature (509)..(509): Absent or Val
  misc_feature (510)..(510): Absent or Ile
  misc_feature (511)..(511): Absent or Gly
  misc_feature (512)..(512): Absent or Ile
  misc_feature (513)..(513): Absent or Asp
  misc_feature (514)..(514): Absent or Leu
  misc_feature (515)..(515): Absent or Thr
  misc_feature (516)..(516): Absent or Leu
  misc_feature (517)..(517): Absent or Pro
  misc_feature (518)..(518): Absent or Glu
  misc_feature (519)..(519): Absent or Lys
  misc_feature (520)..(520): Absent or Ala
  misc_feature (521)..(521): Absent or Asp
  misc_feature (522)..(522): Absent or Glu
  misc_feature (523)..(523): Absent or Asp
  misc_feature (524)..(524): Absent or Glu
  misc_feature (525)..(525): Absent or Glu
  misc_feature (526)..(526): Absent or Phe
  misc_feature (527)..(527): Absent or Tyr
  misc_feature (528)..(528): Absent or Ile
  misc_feature (529)..(529): Absent or Ser
  misc_feature (530)..(530): Absent or Glu
  misc_feature (531)..(531): Absent or Arg
  misc_feature (532)..(532): Absent or Ala
  misc_feature (533)..(533): Absent or Phe
  misc_feature (534)..(534): Absent or Glu
  misc_feature (535)..(535): Absent or Asn
  misc_feature (536)..(536): Absent or Met
  misc_feature (537)..(537): Absent or Thr
  misc_feature (538)..(538): Absent or Asn
  misc_feature (539)..(539): Absent or Leu
  misc_feature (540)..(540): Absent or Gln
  misc_feature (541)..(541): Absent or Phe
  misc_feature (542)..(542): Absent or Leu
  misc_feature (543)..(543): Absent or Lys
  misc_feature (544)..(544): Absent or Ile
  misc_feature (545)..(545): Absent or Ser
  misc_feature (546)..(546): Absent or Gly
  misc_feature (547)..(547): Absent or Asp
  misc_feature (548)..(548): Absent or Cys
  misc_feature (549)..(549): Absent or Ser
  misc_feature (550)..(550): Absent or Arg
  misc_feature (551)..(551): Absent or Leu
  misc_feature (552)..(552): Absent or Tyr
  misc_feature (553)..(553): Absent or Phe
  misc_feature (554)..(554): Absent or Pro
  misc_feature (555)..(555): Absent or Pro
  misc_feature (556)..(556): Absent or Arg
  misc_feature (557)..(557): Absent or Leu
  misc_feature (558)..(558): Absent or Asn
  misc_feature (559)..(559): Absent or Ser
  misc_feature (560)..(560): Absent or Ile
  misc_feature (561)..(561): Absent or Ser
  misc_feature (562)..(562): Absent or Arg
  misc_feature (563)..(563): Absent or Lys
  misc_feature (564)..(564): Absent or Leu
  misc_feature (565)..(565): Absent or Ile
  misc_feature (566)..(566): Absent or Leu
  misc_feature (567)..(567): Absent or Leu
  misc_feature (568)..(568): Absent or Ser
  misc_feature (569)..(569): Absent or Trp
  misc_feature (570)..(570): Absent or Gly
  misc_feature (571)..(571): Absent or Gln
  misc_feature (572)..(572): Absent or Phe
  misc_feature (573)..(573): Absent or Pro
  misc_feature (574)..(574): Absent or Met
  misc_feature (575)..(575): Absent or Thr
  misc_feature (576)..(576): Absent or Leu
  misc_feature (577)..(577): Absent or Leu
  misc_feature (578)..(578): Absent or Pro
  misc_feature (579)..(579): Absent or Ser
  misc_feature (580)..(580): Absent or Asn
  misc_feature (581)..(581): Absent or Phe
  misc_feature (582)..(582): Absent or Asn
  misc_feature (583)..(583): Absent or Pro
  misc_feature (584)..(584): Absent or Gln
  misc_feature (585)..(585): Absent or Ser
  misc_feature (586)..(586): Absent or Leu
  misc_feature (587)..(587): Absent or Val
  misc_feature (588)..(588): Absent or Asn
  misc_feature (589)..(589): Absent or Leu
  misc_feature (590)..(590): Absent or Thr
  misc_feature (591)..(591): Absent or Met
  misc_feature (592)..(592): Absent or Arg
  misc_feature (593)..(593): Absent or Arg
  misc_feature (594)..(594): Absent or Ser
  misc_feature (595)..(595): Absent or Lys
  misc_feature (596)..(596): Absent or Leu
  misc_feature (597)..(597): Absent or Glu
  misc_feature (598)..(598): Absent or Lys
  misc_feature (599)..(599): Absent or Leu
  misc_feature (600)..(600): Absent or Trp
  misc_feature (601)..(601): Absent or Asp
  misc_feature (602)..(602): Absent or Gly
  misc_feature (603)..(603): Absent or Asn
  misc_feature (604)..(604): Absent or Lys
  misc_feature (605)..(605): Absent or Pro
  misc_feature (606)..(606): Absent or Leu
  misc_feature (607)..(607): Absent or Arg
  misc_feature (608)..(608): Absent or Asn
  misc_feature (609)..(609): Absent or Leu
  misc_feature (610)..(610): Absent or Lys
  misc_feature (611)..(611): Absent or Met
  misc_feature (612)..(612): Absent or Met
  misc_feature (613)..(613): Absent or Asp
  misc_feature (614)..(614): Absent or Leu
  misc_feature (615)..(615): Absent or Glu
  misc_feature (616)..(616): Absent or Ser
  misc_feature (617)..(617): Absent or Ser
  misc_feature (618)..(618): Absent or Ile
  misc_feature (619)..(619): Absent or Asp
  misc_feature (620)..(620): Absent or Leu
  misc_feature (621)..(621): Absent or Lys
  misc_feature (622)..(622): Absent or Glu
  misc_feature (623)..(623): Absent or Leu
  misc_feature (624)..(624): Absent or Pro
  misc_feature (625)..(625): Absent or Asp
  misc_feature (626)..(626): Absent or Leu
  misc_feature (627)..(627): Absent or Ser
  misc_feature (628)..(628): Absent or Thr
  misc_feature (629)..(629): Absent or Ala
  misc_feature (630)..(630): Absent or Thr
  misc_feature (631)..(631): Absent or Asn
  misc_feature (632)..(632): Absent or Leu
  misc_feature (633)..(633): Absent or Glu
  misc_feature (634)..(634): Absent or Thr
  misc_feature (635)..(635): Absent or Leu
  misc_feature (636)..(636): Absent or Ile
  misc_feature (637)..(637): Absent or Leu
  misc_feature (638)..(638): Absent or Glu
  misc_feature (639)..(639): Absent or Gly
  misc_feature (640)..(640): Absent or Cys
  misc_feature (641)..(641): Absent or Ser
  misc_feature (642)..(642): Absent or Ser
  misc_feature (643)..(643): Absent or Leu
  misc_feature (644)..(644): Absent or Thr
  misc_feature (645)..(645): Absent or Lys
  misc_feature (646)..(646): Absent or Leu
  misc_feature (647)..(647): Absent or Pro
  misc_feature (648)..(648): Absent or Asp
  misc_feature (649)..(649): Absent or Leu
  misc_feature (650)..(650): Absent or Leu
  misc_feature (651)..(651): Absent or Thr
  misc_feature (652)..(652): Absent or Ala
  misc_feature (653)..(653): Absent or Thr
  misc_feature (654)..(654): Absent or Ser
  misc_feature (655)..(655): Absent or Leu
  misc_feature (656)..(656): Absent or Lys
  misc_feature (657)..(657): Absent or Thr
  misc_feature (658)..(658): Absent or Leu
  misc_feature (659)..(659): Absent or Asn
  misc_feature (660)..(660): Absent or Leu
  misc_feature (661)..(661): Absent or Asp
  misc_feature (662)..(662): Absent or Ser
  misc_feature (663)..(663): Absent or Cys
  misc_feature (664)..(664): Absent or Ser
  misc_feature (665)..(665): Absent or Ser
  misc_feature (666)..(666): Absent or Leu
  misc_feature (667)..(667): Absent or Met
  misc_feature (668)..(668): Absent or Glu
  misc_feature (669)..(669): Absent or Leu
  misc_feature (670)..(670): Absent or Pro
  misc_feature (671)..(671): Absent or Ser
  misc_feature (672)..(672): Absent or Leu
  misc_feature (673)..(673): Absent or Pro
  misc_feature (674)..(674): Absent or Gly
  misc_feature (675)..(675): Absent or Asn
  misc_feature (676)..(676): Absent or Ala
  misc_feature (677)..(677): Absent or Asn
  misc_feature (678)..(678): Absent or Ala
  misc_feature (679)..(679): Absent or Thr
  misc_feature (680)..(680): Absent or Asn
  misc_feature (681)..(681): Absent or Leu
  misc_feature (682)..(682): Absent or Thr
  misc_feature (683)..(683): Absent or Tyr
  misc_feature (684)..(684): Absent or Leu
  misc_feature (685)..(685): Absent or Ser
  misc_feature (686)..(686): Absent or Leu
  misc_feature (687)..(687): Absent or Arg
  misc_feature (688)..(688): Absent or Gly
  misc_feature (689)..(689): Absent or Cys
  misc_feature (690)..(690): Absent or Ser
  misc_feature (691)..(691): Absent or Ser
  misc_feature (692)..(692): Absent or Leu
  misc_feature (693)..(693): Absent or Val
  misc_feature (694)..(694): Absent or Glu
  misc_feature (695)..(695): Absent or Leu
  misc_feature (696)..(696): Absent or Pro
  misc_feature (697)..(697): Absent or Ser
  misc_feature (698)..(698): Absent or Ser
  misc_feature (699)..(699): Absent or Ile
  misc_feature (700)..(700): Absent or Gly
  misc_feature (701)..(701): Absent or Asn
  misc_feature (702)..(702): Absent or Ala
  misc_feature (703)..(703): Absent or Thr
  misc_feature (704)..(704): Absent or Asn
  misc_feature (705)..(705): Absent or Ile
  misc_feature (706)..(706): Absent or Lys
  misc_feature (707)..(707): Absent or Glu
  misc_feature (708)..(708): Absent or Leu
  misc_feature (709)..(709): Absent or Val
  misc_feature (710)..(710): Absent or Leu
  misc_feature (711)..(711): Absent or Asp
  misc_feature (712)..(712): Absent or Asp
  misc_feature (713)..(713): Absent or Cys
  misc_feature (714)..(714): Absent or Ser
  misc_feature (715)..(715): Absent or Asn
  misc_feature (716)..(716): Absent or Leu
  misc_feature (717)..(717): Absent or Val
  misc_feature (718)..(718): Absent or Glu
  misc_feature (719)..(719): Absent or Leu
  misc_feature (720)..(720): Absent or Pro
  misc_feature (721)..(721): Absent or Phe
  misc_feature (722)..(722): Absent or Ser
  misc_feature (723)..(723): Absent or Ile
  misc_feature (724)..(724): Absent or Gly
  misc_feature (725)..(725): Absent or Asn
  misc_feature (726)..(726): Absent or Leu
  misc_feature (727)..(727): Absent or His
  misc_feature (728)..(728): Absent or Lys
  misc_feature (729)..(729): Absent or Leu
  misc_feature (730)..(730): Absent or Leu
  misc_feature (731)..(731): Absent or Arg
  misc_feature (732)..(732): Absent or Leu
  misc_feature (733)..(733): Absent or Ile
  misc_feature (734)..(734): Absent or Met
  misc_feature (735)..(735): Absent or Arg
  misc_feature (736)..(736): Absent or Gly
  misc_feature (737)..(737): Absent or Cys
  misc_feature (738)..(738): Absent or Ser
  misc_feature (739)..(739): Absent or Lys
  misc_feature (740)..(740): Absent or Leu
  misc_feature (741)..(741): Absent or Glu
  misc_feature (742)..(742): Absent or Val
  misc_feature (743)..(743): Absent or Leu
  misc_feature (744)..(744): Absent or Pro
  misc_feature (745)..(745): Absent or Thr
  misc_feature (746)..(746): Absent or Asn
  misc_feature (747)..(747): Absent or Ile
  misc_feature (748)..(748): Absent or Asn
  misc_feature (749)..(749): Absent or Leu
  misc_feature (750)..(750): Absent or Glu
  misc_feature (751)..(751): Absent or Ser
  misc_feature (752)..(752): Absent or Leu
  misc_feature (753)..(753): Absent or Glu
  misc_feature (754)..(754): Absent or Glu
  misc_feature (755)..(755): Absent or Leu
  misc_feature (756)..(756): Absent or Tyr
  misc_feature (757)..(757): Absent or Leu
  misc_feature (758)..(758): Absent or Gln
  misc_feature (759)..(759): Absent or Asn
  misc_feature (760)..(760): Absent or Cys
  misc_feature (761)..(761): Absent or Ser
  misc_feature (762)..(762): Absent or Leu
  misc_feature (763)..(763): Absent or Leu
  misc_feature (764)..(764): Absent or Lys
  misc_feature (765)..(765): Absent or Thr
  misc_feature (766)..(766): Absent or Phe
  misc_feature (767)..(767): Absent or Pro
  misc_feature (768)..(768): Absent or Glu
  misc_feature (769)..(769): Absent or Ile
  misc_feature (770)..(770): Absent or Ser
  misc_feature (771)..(771): Absent or Thr
  misc_feature (772)..(772): Absent or Asn
  misc_feature (773)..(773): Absent or Ile
  misc_feature (774)..(774): Absent or Lys
  misc_feature (775)..(775): Absent or Leu
  misc_feature (776)..(776): Absent or Leu
  misc_feature (777)..(777): Absent or His
  misc_feature (778)..(778): Absent or Leu
  misc_feature (779)..(779): Absent or Thr
  misc_feature (780)..(780): Absent or Arg
  misc_feature (781)..(781): Absent or Thr
  misc_feature (782)..(782): Absent or Ala
  misc_feature (783)..(783): Absent or Val
  misc_feature (784)..(784): Absent or Glu
  misc_feature (785)..(785): Absent or Glu
  misc_feature (786)..(786): Absent or Val
  misc_feature (787)..(787): Absent or Pro
  misc_feature (788)..(788): Absent or Leu
  misc_feature (789)..(789): Absent or Gly
  misc_feature (790)..(790): Absent or Ile
  misc_feature (791)..(791): Absent or Arg
  misc_feature (792)..(792): Absent or Ser
  misc_feature (793)..(793): Absent or Trp
  misc_feature (794)..(794): Absent or Ser
  misc_feature (795)..(795): Absent or Arg
  misc_feature (796)..(796): Absent or Leu
  misc_feature (797)..(797): Absent or Glu
  misc_feature (798)..(798): Absent or Glu
  misc_feature (799)..(799): Absent or Leu
  misc_feature (800)..(800): Absent or His
  misc_feature (801)..(801): Absent or Met
  misc_feature (802)..(802): Absent or Ser
  misc_feature (803)..(803): Absent or Tyr
  misc_feature (804)..(804): Absent or Cys
  misc_feature (805)..(805): Absent or Glu
  misc_feature (806)..(806): Absent or Asn
  misc_feature (807)..(807): Absent or Leu
  misc_feature (808)..(808): Absent or Lys
  misc_feature (809)..(809): Absent or Asn
  misc_feature (810)..(810): Absent or Ser
  misc_feature (811)..(811): Absent or Pro
  misc_feature (812)..(812): Absent or His
  misc_feature (813)..(813): Absent or Ala
  misc_feature (814)..(814): Absent or Leu
  misc_feature (815)..(815): Absent or Asp
  misc_feature (816)..(816): Absent or Ser
  misc_feature (817)..(817): Absent or Ile
  misc_feature (818)..(818): Absent or Thr
  misc_feature (819)..(819): Absent or Asp
  misc_feature (820)..(820): Absent or Leu
  misc_feature (821)..(821): Absent or His
  misc_feature (822)..(822): Absent or Leu
  misc_feature (823)..(823): Absent or Thr
  misc_feature (824)..(824): Absent or Asp
  misc_feature (825)..(825): Absent or Thr
  misc_feature (826)..(826): Absent or Glu
  misc_feature (827)..(827): Absent or Ile
  misc_feature (828)..(828): Absent or Gln
  misc_feature (829)..(829): Absent or Glu
  misc_feature (830)..(830): Absent or Leu
  misc_feature (831)..(831): Absent or Gly
  misc_feature (832)..(832): Absent or Pro
  misc_feature (833)..(833): Absent or Trp
  misc_feature (834)..(834): Absent or Ile
  misc_feature (835)..(835): Absent or Lys
  misc_feature (836)..(836): Absent or Gly
  misc_feature (837)..(837): Absent or Phe
  misc_feature (838)..(838): Absent or Ser
  misc_feature (839)..(839): Absent or Arg
  misc_feature (840)..(840): Absent or Leu
  misc_feature (841)..(841): Absent or Arg
  misc_feature (842)..(842): Absent or Arg
  misc_feature (843)..(843): Absent or Leu
  misc_feature (844)..(844): Absent or Val
  misc_feature (845)..(845): Absent or Leu
  misc_feature (846)..(846): Absent or Asn
  misc_feature (847)..(847): Absent or Gly
  misc_feature (848)..(848): Absent or Ser
  misc_feature (849)..(849): Absent or Gln
  misc_feature (850)..(850): Absent or Lys
  misc_feature (851)..(851): Absent or Leu
  misc_feature (852)..(852): Absent or Val
  misc_feature (853)..(853): Absent or Ser
  misc_feature (854)..(854): Absent or Leu
  misc_feature (855)..(855): Absent or Pro
  misc_feature (856)..(856): Absent or Gln
  misc_feature (857)..(857): Absent or Leu
  misc_feature (858)..(858): Absent or Pro
  misc_feature (859)..(859): Absent or Asp
  misc_feature (860)..(860): Absent or Ser
  misc_feature (861)..(861): Absent or Leu
  misc_feature (862)..(862): Absent or Leu
  misc_feature (863)..(863): Absent or Phe
  misc_feature (864)..(864): Absent or Leu
  misc_feature (865)..(865): Absent or Asp
  misc_feature (866)..(866): Absent or Ala
  misc_feature (867)..(867): Absent or Glu
  misc_feature (868)..(868): Absent or Asn
  misc_feature (869)..(869): Absent or Cys
  misc_feature (870)..(870): Absent or Glu
  misc_feature (871)..(871): Absent or Ser
  misc_feature (872)..(872): Absent or Leu
  misc_feature (873)..(873): Absent or Glu
  misc_feature (874)..(874): Absent or Lys
  misc_feature (875)..(875): Absent or Leu
  misc_feature (876)..(876): Absent or Asp
  misc_feature (877)..(877): Absent or Cys
  misc_feature (878)..(878): Absent or Ser
  misc_feature (879)..(879): Absent or Phe
  misc_feature (880)..(880): Absent or Cys
  misc_feature (881)..(881): Absent or Asn
  misc_feature (882)..(882): Absent or Pro
  misc_feature (883)..(883): Absent or Asp
  misc_feature (884)..(884): Absent or Met
  misc_feature (885)..(885): Absent or Ser
  misc_feature (886)..(886): Absent or Leu
  misc_feature (887)..(887): Absent or Asn
  misc_feature (888)..(888): Absent or Phe
  misc_feature (889)..(889): Absent or Tyr
  misc_feature (890)..(890): Absent or Asn
  misc_feature (891)..(891): Absent or Cys
  misc_feature (892)..(892): Absent or Phe
  misc_feature (893)..(893): Absent or Lys
  misc_feature (894)..(894): Absent or Leu
  misc_feature (895)..(895): Absent or Asn
  misc_feature (896)..(896): Absent or Gln
  misc_feature (897)..(897): Absent or Glu
  misc_feature (898)..(898): Absent or Ala
  misc_feature (899)..(899): Absent or Arg
  misc_feature (900)..(900): Absent or Asp
  misc_feature (901)..(901): Absent or Leu
  misc_feature (902)..(902): Absent or Ile
  misc_feature (903)..(903): Absent or Ile
  misc_feature (904)..(904): Absent or Gln
  misc_feature (905)..(905): Absent or Ala
  misc_feature (906)..(906): Absent or Ser
  misc_feature (907)..(907): Absent or Asn
  misc_feature (908)..(908): Absent or Arg
  misc_feature (909)..(909): Absent or Pro
  misc_feature (910)..(910): Absent or Val
  misc_feature (911)..(911): Absent or Ser
  misc_feature (912)..(912): Absent or Val
  misc_feature (913)..(913): Absent or Val
  misc_feature (914)..(914): Absent or Pro
  misc_feature (915)..(915): Absent or Gly
  misc_feature (916)..(916): Absent or Gly
  misc_feature (917)..(917): Absent or Glu
  misc_feature (918)..(918): Absent or Val
  misc_feature (919)..(919): Absent or Pro
  misc_feature (920)..(920): Absent or Ala
  misc_feature (921)..(921): Absent or Tyr
  misc_feature (922)..(922): Absent or Phe
  misc_feature (923)..(923): Absent or Ser
  misc_feature (924)..(924): Absent or Asp
  misc_feature (925)..(925): Absent or Arg
  misc_feature (926)..(926): Absent or Ala
  misc_feature (927)..(927): Absent or Thr
  misc_feature (928)..(928): Absent or Gly
  misc_feature (929)..(929): Absent or Ser
  misc_feature (930)..(930): Absent or Ile
  misc_feature (931)..(931): Absent or Val
  misc_feature (932)..(932): Absent or Thr
  misc_feature (933)..(933): Absent or Val
  misc_feature (934)..(934): Absent or Lys
  misc_feature (935)..(935): Absent or Leu
  misc_feature (936)..(936): Absent or Asn
  misc_feature (937)..(937): Absent or Glu
  misc_feature (938)..(938): Absent or Arg
  misc_feature (939)..(939): Absent or Pro
  misc_feature (940)..(940): Absent or Pro
  misc_feature (941)..(941): Absent or His
  misc_feature (942)..(942): Absent or Lys
  misc_feature (943)..(943): Absent or Pro
  misc_feature (944)..(944): Absent or Leu
  misc_feature (945)..(945): Absent or Arg
  misc_feature (946)..(946): Absent or Phe
  misc_feature (947)..(947): Absent or Lys
  misc_feature (948)..(948): Absent or Ala
  misc_feature (949)..(949): Absent or Cys
  misc_feature (950)..(950): Absent or Val
  misc_feature (951)..(951): Absent or Met
  misc_feature (952)..(952): Absent or Leu
  misc_feature (953)..(953): Absent or Val
  misc_feature (954)..(954): Absent or Asp
  misc_feature (955)..(955): Absent or Asn
  misc_feature (956)..(956): Absent or Val
  misc_feature (957)..(957): Absent or Asp
  misc_feature (958)..(958): Absent or Asn
  misc_feature (959)..(959): Absent or Pro
  misc_feature (960)..(960): Absent or Pro
  misc_feature (961)..(961): Absent or Cys
  misc_feature (962)..(962): Absent or Gly
  misc_feature (963)..(963): Absent or Gly
  misc_feature (964)..(964): Absent or Thr
  misc_feature (965)..(965): Absent or Tyr
  misc_feature (966)..(966): Absent or Ser
  misc_feature (967)..(967): Absent or Met
  misc_feature (968)..(968): Absent or Tyr
  misc_feature (969)..(969): Absent or Leu
  misc_feature (970)..(970): Absent or Gln
  misc_feature (971)..(971): Absent or Tyr
  misc_feature (972)..(972): Absent or Lys
  misc_feature (973)..(973): Absent or Ile
  misc_feature (974)..(974): Absent or Met
  misc_feature (975)..(975): Absent or Asp
  misc_feature (976)..(976): Absent or Lys
  misc_feature (977)..(977): Absent or Gln
  misc_feature (978)..(978): Absent or Asn
  misc_feature (979)..(979): Absent or Gly
  misc_feature (980)..(980): Absent or Val
  misc_feature (981)..(981): Absent or Ile
  misc_feature (982)..(982): Absent or Val
  misc_feature (983)..(983): Absent or Pro
  misc_feature (984)..(984): Absent or Cys
  misc_feature (985)..(985): Absent or Pro
  misc_feature (986)..(986): Absent or Pro
  misc_feature (987)..(987): Absent or Gly
  misc_feature (988)..(988): Absent or Tyr
  misc_feature (989)..(989): Absent or Leu
  misc_feature (990)..(990): Absent or Ser
  misc_feature (991)..(991): Absent or Leu
  misc_feature (992)..(992): Absent or Pro
  misc_feature (993)..(993): Absent or Arg
  misc_feature (994)..(994): Absent or Ala
  misc_feature (995)..(995): Absent or Val
  misc_feature (996)..(996): Absent or Thr
  misc_feature (997)..(997): Absent or Phe
  misc_feature (998)..(998): Absent or Val
  misc_feature (999)..(999): Absent or Gly
  misc_feature (1000)..(1000): Absent or His
  misc_feature (1001)..(1001): Absent or Leu
  misc_feature (1002)..(1002): Absent or Tyr
  misc_feature (1003)..(1003): Absent or Thr
  misc_feature (1004)..(1004): Absent or Phe
  misc_feature (1005)..(1005): Absent or Asn
  misc_feature (1006)..(1006): Absent or Leu
  misc_feature (1007)..(1007): Absent or Glu
  misc_feature (1008)..(1008): Absent or Val
  misc_feature (1009)..(1009): Absent or Asp
  misc_feature (1010)..(1010): Absent or Val
  misc_feature (1011)..(1011): Absent or Thr
  misc_feature (1012)..(1012): Absent or Ser
  misc_feature (1013)..(1013): Absent or Asn
  misc_feature (1014)..(1014): Absent or Glu
  misc_feature (1015)..(1015): Absent or Leu
  misc_feature (1016)..(1016): Absent or Cys
  misc_feature (1017)..(1017): Absent or Phe
  misc_feature (1018)..(1018): Absent or Glu
  misc_feature (1019)..(1019): Absent or Leu
  misc_feature (1020)..(1020): Absent or Thr
  misc_feature (1021)..(1021): Absent or Val
  misc_feature (1022)..(1022): Absent or Tyr
  misc_feature (1023)..(1023): Absent or Cys
  misc_feature (1024)..(1024): Absent or Lys
  misc_feature (1025)..(1025): Absent or Glu
  misc_feature (1026)..(1026): Absent or Trp
  misc_feature (1027)..(1027): Absent or Asp
  misc_feature (1028)..(1028): Absent or Asp
  misc_feature (1029)..(1029): Absent or Pro
  misc_feature (1030)..(1030): Absent or Ser
  misc_feature (1031)..(1031): Absent or Phe
  misc_feature (1032)..(1032): Absent or Ser
  misc_feature (1033)..(1033): Absent or Gly
  misc_feature (1034)..(1034): Absent or Ser
  misc_feature (1035)..(1035): Absent or Cys
  misc_feature (1036)..(1036): Absent or Thr
  misc_feature (1037)..(1037): Absent or Thr
  misc_feature (1038)..(1038): Absent or Ser
  misc_feature (1039)..(1039): Absent or Met or Ser
  misc_feature (1040)..(1040): Absent or Ala or Thr or Met or Phe
  misc_feature (1041)..(1041): Absent or Ala or Arg or Met
  misc_feature (1042)..(1042): Absent or Arg or Cys or Met or Ala or Asn or Asp
  misc_feature (1043)..(1043): Absent or Leu or Ala or Ser or Thr or Phe
  misc_feature (1044)..(1044): Absent or Met or Leu or Val or Ala or Ser or Arg or Trp
  misc_feature (1045)..(1045): Absent or Ala or Val or Trp or Leu
  misc_feature (1046)..(1046): Absent or Thr or Pro or Ala or Leu or Ser
  misc_feature (1047)..(1047): Absent or Arg or Leu or Ala or Val or Ile or Trp or Met
  misc_feature (1048)..(1048): Absent or Leu or Val or Thr or Ala or Ile
  misc_feature (1049)..(1049): Absent or Leu or Ala or Val or Phe
  misc_feature (1050)..(1050): Absent or Cys or Leu or Ala or Phe
  misc_feature (1051)..(1051): Absent or Trp or Leu or Val
  misc_feature (1052)..(1052): Absent or Thr or Leu or Ile or Cys or Tyr or Ser
  misc_feature (1053)..(1053): Absent or Ala or Leu or Met or Ile or Val
  misc_feature (1054)..(1054): Absent or Leu or Val or Ala or Gly or Ile
  misc_feature (1055)..(1055): Absent or Leu or Ala or Val or Met or Gly
  misc_feature (1056)..(1056): Absent or Leu or Ala or Gly or Val or Ile
  misc_feature (1057)..(1057): Absent or Pro or Ala or Gln or Ser or Leu
  misc_feature (1058)..(1058): Absent or Ile or Leu or Ala or Gly or Ser or Thr or Cys
  misc_feature (1059)..(1059): Absent or Ile or Pro or Ala or Thr or Leu or Phe
  misc_feature (1060)..(1060): Absent or Ala or Pro or Phe or Gly or Ser or Thr
  misc_feature (1061)..(1061): Absent or Ala or Pro or Gly or Ser
  misc_feature (1062)..(1062): Absent or Thr or Ala or Gly or Ser or Phe
  misc_feature (1063)..(1063): Absent or Ala or Gly or Ser or Ile or Leu or Phe
  misc_feature (1064)..(1064): Absent or Ala or Glu or Pro or Ser
  misc_feature (1065)..(1065): Absent or Ala or Glu or Ser or Tyr
  misc_feature (1066)..(1066): Absent or Ser or Glu
  misc_feature (1067)..(1067): Absent or Pro or Glu or Gly or Ala
  misc_feature (1068)..(1068): Absent or Leu or Glu or Ala or Val
  misc_feature (1069)..(1069): Absent or Pro or Glu or Gly or Asp
  misc_feature (1070)..(1070): Absent or Glu or Ala or Ser or Pro or Gly or Val or Phe
  misc_feature (1071)..(1071): Absent or Ala or Arg or Thr or Ser or Cys
  misc_feature (1072)..(1072): Absent or Cys or Ser or Ile or Asp or Val or Asn
  misc_feature (1073)..(1073): Absent or Pro or Ala or Cys or His
  misc_feature (1074)..(1074): Absent or Val or Arg or Leu or Pro or Asn
  misc_feature (1075)..(1075): Absent or Pro or Glu or Arg or Gly or Asn or Asp or Leu or Tyr
  misc_feature (1076)..(1076): Absent or Thr or Trp or Ala or Gly or Glu or Gln
  misc_feature (1077)..(1077): Absent or Ala or Leu or Gly or Ser or Phe
  misc_feature (1078)..(1078): Absent or Ala or Pro or Ser or Asp or Glu
  misc_feature (1079)..(1079): Absent or Glu or Pro or Gly or Ser or Leu or Phe or Val
  misc_feature (1080)..(1080): Absent or Glu or Phe or Leu or Ser
  misc_feature (1081)..(1081): Absent or Ile or Val or Leu or Arg
  misc_feature (1082)..(1082): Absent or Leu or Ala or Asp or Tyr or His or Cys or Ser or Phe
  misc_feature (1083)..(1083): Absent or Gly or Ala or Asn or Asp or His or Phe or Val
  misc_feature (1084)..(1084): Absent or Pro or Ala or Leu or Val or Ile
  misc_feature (1085)..(1085): Absent or Gly or Ala or Gln or Glu
  misc_feature (1086)..(1086): Absent or Gly or Ala or Ser or Arg or Gln
  misc_feature (1087)..(1087): Absent or Thr or Ala or Arg or Gln or Lys
  misc_feature (1090)..(1090): Absent or Pro or Arg
  misc_feature (1091)..(1091): Absent or Leu or Ser or Cys or Gly or Phe
  misc_feature (1092)..(1092): Absent or Asp or Cys or Ile or Ala or Val or Leu or Pro or Arg
  misc_feature (1093)..(1093): Absent or Arg or Ser or Glu or Phe
  misc_feature (1094)..(1094): Absent or Arg or Ala or Ile or Leu
  misc_feature (1095)..(1095): Absent or Gly or Ser or Glu or Val or Asp or Pro or Phe or Tyr
  misc_feature (1096)..(1096): Absent or Asp or Ala or Pro or Ser
  misc_feature (1097)..(1097): Absent or Pro or Glu or Ser or Asn or His or Arg or Thr
  misc_feature (1100)..(1100): Absent or Val or Leu
  misc_feature (1101)..(1101): Absent or Glu
  misc_feature (1102)..(1102): Absent or Val or Ile
  misc_feature (1103)..(1103): Absent or Asn
  misc_feature (1104)..(1104): Absent or Glu
  misc_feature (1105)..(1105): Absent or Pro
  misc_feature (1106)..(1106): Absent or Ser
  misc_feature (1107)..(1107): Absent or Leu
  misc_feature (1108)..(1108): Absent or Leu
  misc_feature (1109)..(1109): Absent or Leu
  misc_feature (1110)..(1110): Absent or Ala
  misc_feature (1111)..(1111): Absent or Ala
  misc_feature (1112)..(1112): Absent or Ala
  misc_feature (1113)..(1113): Absent or Gly
  misc_feature (1114)..(1114): Absent or His
  misc_feature (1115)..(1115): Absent or Ile
  misc_feature (1116)..(1116): Absent or Leu
  misc_feature (1117)..(1117): Absent or Ile
  misc_feature (1118)..(1118): Absent or X
  misc_feature (1119)..(1119): Absent or Lys
  misc_feature (1120)..(1120): Absent or Val
  misc_feature (1121)..(1121): Absent or Pro
  misc_feature (1122)..(1122): Absent or Cys
  misc_feature (1123)..(1123): Absent or Leu
  misc_feature (1124)..(1124): Absent or Tyr
  misc_feature (1125)..(1125): Absent or Arg
  misc_feature (1126)..(1126): Absent or Leu
  misc_feature (1127)..(1127): Absent or Ile
  misc_feature (1128)..(1128): Absent or Lys
  misc_feature (1129)..(1129): Absent or Trp
  misc_feature (1130)..(1130): Absent or Asn
  misc_feature (1131)..(1131): Absent or Phe
  misc_feature (1132)..(1132): Absent or Cys
  misc_feature (1133)..(1133): Absent or Trp
  misc_feature (1134)..(1134): Absent or Cys
  misc_feature (1135)..(1135): Absent or Leu
  misc_feature (1136)..(1136): Absent or Glu
  misc_feature (1137)..(1137): Absent or Cys
  misc_feature (1138)..(1138): Absent or Gly
  misc_feature (1139)..(1139): Absent or Trp
  misc_feature (1140)..(1140): Absent or Val
  misc_feature (1141)..(1141): Absent or Ile
  misc_feature (1142)..(1142): Absent or Leu
  misc_feature (1143)..(1143): Absent or Arg
  misc_feature (1144)..(1144): Absent or Ile
  misc_feature (1145)..(1145): Absent or Trp
  misc_feature (1146)..(1146): Absent or Lys
  misc_feature (1147)..(1147): Absent or Val
  misc_feature (1148)..(1148): Absent or Val
  misc_feature (1149)..(1149): Absent or Val
  misc_feature (1150)..(1150): Absent or Ser
  misc_feature (1151)..(1151): Absent or Tyr
  misc_feature (1152)..(1152): Absent or Ile
  misc_feature (1153)..(1153): Absent or Pro
  misc_feature (1154)..(1154): Absent or Cys
  misc_feature (1155)..(1155): Absent or Pro or Leu
  misc_feature (1156)..(1156): Val or Ala or Absent or Leu
  misc_feature (1157)..(1157): Val or Ile or Glu or Absent or Leu or Thr
  misc_feature (1158)..(1158): Gln or Glu or Met or Absent or Lys or Asp
  misc_feature (1160)..(1160): Asn or Asp or Arg
  misc_feature (1162)..(1162): Thr or Val or Glu or Asp or Asn or Lys
  misc_feature (1163)..(1163): Thr or Glu or Ala or Phe or Leu or Ser
  misc_feature (1166)..(1166): Lys or Thr or Gly or Arg
  misc_feature (1167)..(1167): Ala or Glu or Ile or Leu
  misc_feature (1168)..(1168): Leu or Ile or Phe or Val or Met
  misc_feature (1169)..(1169): Asp or Thr or Ser or Asn or Ala
  misc_feature (1170)..(1170): Leu or Gly or Asp or Ser or Val or Ala
  misc_feature (1171)..(1171): Val or Lys or Arg or Ile or Asn or His or Gln
  misc_feature (1172)..(1172): His or Absent or Asn
  misc_feature (1173)..(1173): Ser or Met or Absent
  misc_feature (1174)..(1174): Ser or Asn or Glu or His or Cys or Arg or Lys or Gln
  misc_feature (1175)..(1175): Asn or Lys or Glu or Arg or Thr or Gly
  misc_feature (1176)..(1176): Gly or Asp or Absent or Thr or Asn
  misc_feature (1177)..(1177): Thr or Asp or Absent or Val or Ala or Glu or Ser or Gly
  misc_feature (1178)..(1178): Tyr or Cys or Thr or Ser or Phe
  misc_feature (1179)..(1179): Met or Ile or Thr or Tyr or Cys
  misc_feature (1181)..(1181): Val or Ile
  misc_feature (1186)..(1186): Thr or Ser or Ala or Pro
  misc_feature (1192)..(1192): Arg or Gln or Ser or Cys
  misc_feature (1193)..(1193): Gln or Glu or Arg or Lys or Ile or Ser or Leu or Ala or Thr
  misc_feature (1194)..(1194): Val or Cys or Met or Phe or Leu or Ile
  misc_feature (1197)..(1197): Val or Asn or Ile or Gln or Lys
  misc_feature (1199)..(1199): Asp or Glu or Gly
  misc_feature (1200)..(1200): Val or Ile or Asp or Ala or Thr or Met
  misc_feature (1207)..(1207): Thr or Ser or Arg or Gln or His
  misc_feature (1209)..(1209): His or Arg or Lys or Tyr or Glu or Gly or Thr or Gln
  misc_feature (1211)..(1211): Val or Phe or Leu
  misc_feature (1212)..(1212): Ala or Thr or Val or Ile
  misc_feature (1213)..(1213): Ile or Phe or Val or Leu
  misc_feature (1215)..(1215): Glu or Gln or Lys or His
  misc_feature (1217)..(1217): Ser or Asn or Gln
  misc_feature (1219)..(1219): Arg or Met or Thr or Leu or Val or His or Ser
  misc_feature (1222)..(1222): Val or Ile or Leu or Phe or Met or Absent
  misc_feature (1228)..(1228): Val or Ile
  misc_feature (1229)..(1229): His or Arg
  misc_feature (1231)..(1231): Phe or Leu
  misc_feature (1233)..(1233): Val or Thr or Ser or Ala
  misc_feature (1236)..(1236): Met or Leu or Ile
  misc_feature (1239)..(1239): Arg or Ser or Gly or Glu or Gln
  misc_feature (1241)..(1241): Absent or X
  misc_feature (1242)..(1242): Ala or Met or Tyr or Thr or Ser or Leu
  misc_feature (1243)..(1243): Arg or Ala or Met or Lys or Asn
  misc_feature (1244)..(1244): Val or Tyr or Leu or Met or Ala
  misc_feature (1247)..(1247): Tyr or His or Val or Trp or Arg or Ile
  misc_feature (1249)..(1249): Pro or Ser or Thr or Arg
  misc_feature (1253)..(1253): Glu or Lys or Asp or Ser or Asn or Leu or Gln or Pro or Ala or Ile
  misc_feature (1256)..(1256): Ile or Ala or Val or Leu or Phe
  misc_feature (1257)..(1257): Leu or Ala or Asn or Asp or Gln or Glu or Lys
  misc_feature (1260)..(1260): Gln or Arg or Thr or Lys or Glu
  misc_feature (1261)..(1261): Asn or Asp or Ala or Glu or Arg or Lys or His
  misc_feature (1262)..(1262): Tyr or Val or Thr or Lys or Ala
  misc_feature (1265)..(1265): Arg or Phe or Absent or Glu or His
  misc_feature (1266)..(1266): Lys or Asp or Absent or Ser or Phe
  misc_feature (1267)..(1267): Glu or Val or Absent or Met or Gly
  misc_feature (1268)..(1268): Absent or Leu or Trp
  misc_feature (1269)..(1269): Absent or His or Ile
  misc_feature (1270)..(1270): Absent or Glu or Asp
  misc_feature (1271)..(1271): Absent or Lys or Leu
  misc_feature (1272)..(1272): Absent or Pro or Glu
  misc_feature (1273)..(1273): Absent or Asp or Ile
  misc_feature (1274)..(1274): Absent or Cys or Thr
  misc_feature (1275)..(1275): Absent or Val or Gly
  misc_feature (1276)..(1276): Absent or Ser or Cys
  misc_feature (1277)..(1277): Absent or Val or Cys
  misc_feature (1278)..(1278): Absent or Ser
  misc_feature (1279)..(1279): Absent or Gly
  misc_feature (1280)..(1280): Absent or Phe
  misc_feature (1281)..(1281): Absent or Pro
  misc_feature (1282)..(1282): Asp or Ser or Absent or Cys or Gly
  misc_feature (1283)..(1283): Cys or Met or Gln or Phe or Leu or Ile
  misc_feature (1284)..(1284): Ala or Thr or Glu or Asp or Lys or Gln
  misc_feature (1286)..(1286): Ala or Glu or Ile or Ser or Val
  misc_feature (1287)..(1287): Arg or Ala or Thr or Ser or Gln
  misc_feature (1289)..(1289): Val or Leu or Phe or Ile or Met
  misc_feature (1290)..(1290): Tyr or His or Gly or Asp or Val or Ala or Thr
  misc_feature (1291)..(1291): Asp or Ser or Pro or Val or Ile or Glu or Lys or Absent or X
  misc_feature (1292)..(1292): Ala or Val or Arg or Asp or Ser or Tyr or Glu or Lys
  misc_feature (1293)..(1293): Gly or Asp or Lys or Absent or Pro or Glu or Gln or Ala
  misc_feature (1294)..(1294): Absent or Gly or Trp or Asp or Glu or Asn
  misc_feature (1295)..(1295): Thr or Ile or Ser or His or Gln or Glu or Absent or Asp or Pro
  misc_feature (1296)..(1296): Glu or Ala or Gln or Ser or Pro or Ile or Absent or Thr
  misc_feature (1297)..(1297): Met or Leu or Ala or Asp or Glu or Thr or Ser or Arg or Absent or Gly
  misc_feature (1298)..(1298): Lys or Arg or Ser or Gly or Phe or Absent or Leu
  misc_feature (1299)..(1299): Absent or Lys or Thr or Ala or Leu or Glu or Asp or Arg or Asn
  misc_feature (1300)..(1300): Absent or Asp or Met or Glu or Lys
  misc_feature (1301)..(1301): Absent or Ala or Ser or Gly or Pro
  misc_feature (1302)..(1302): Absent or Glu or Gly or Asp or Cys or Arg or His or Thr or Ala
  misc_feature (1303)..(1303): Absent or Gln or Ser or Asp or Glu or Gly
  misc_feature (1304)..(1304): Glu or Thr or Phe or Leu or Asn or Lys or Gln or Absent or Gly
  misc_feature (1305)..(1305): Gly or Asn or Gln or Arg or Ser
  misc_feature (1306)..(1306): Cys or His or Pro or Ser or Thr or Ile or Leu
  misc_feature (1307)..(1307): Pro or Val or Ala or Thr or Met or Leu or Ile
  misc_feature (1308)..(1308): Tyr or Phe or Lys or Thr or Met or Asn or Gln or Absent or X
  misc_feature (1309)..(1309): Pro or Trp or Leu or Lys or Thr
  misc_feature (1311)..(1311): Ala or Lys or Asp or Gly or Ser or Tyr or Asn or Leu
  misc_feature (1312)..(1312): Ile or Arg or Ser or Absent or Gly or His
  misc_feature (1313)..(1313): Absent or Asn or Lys
  misc_feature (1314)..(1314): Absent or Gly
  misc_feature (1315)..(1315): Absent or Leu or Ser or Pro or Thr
  misc_feature (1317)..(1317): Pro or Ile or Leu or Met or Val
  misc_feature (1318)..(1318): Glu or Ile or Arg or Lys
  misc_feature (1320)..(1320): Trp or Ile or Ala or Met or Thr or Val
  misc_feature (1321)..(1321): Leu or Ala or Trp or Met or Ile or Phe
  misc_feature (1322)..(1322): Gln or Lys or Glu or Ser or Thr or Asn
  misc_feature (1323)..(1323): Asp or Gln or Ser or Arg
  misc_feature (1324)..(1324): Asp or Glu
  misc_feature (1326)..(1326): Tyr or Phe
  misc_feature (1328)..(1328): Asn or Ala or Leu or Phe or Val
  misc_feature (1330)..(1330): Ala or Ser or Gly
  misc_feature (1331)..(1331): Val or Thr or Ile or Ala or Leu
  misc_feature (1332)..(1332): Val or Ala or Leu or Met
  misc_feature (1334)..(1334): Leu or Val or Ile or Phe
  misc_feature (1335)..(1335): Val or Ile or Cys or Ser
  misc_feature (1337)..(1337): Arg or Lys or Gln
  misc_feature (1338)..(1338): Leu or Ile or Val or Met
  misc_feature (1339)..(1339): Val or Leu or Ala
  misc_feature (1340)..(1340): Tyr or Absent or Ala or Leu or Ile
  misc_feature (1341)..(1341): Absent or Leu
  misc_feature (1342)..(1342): Val or Leu or Absent or His or Phe or Tyr or Ala
  misc_feature (1343)..(1343): Leu or Absent or Phe or Val or Ile or Ala
  misc_feature (1344)..(1344): Ile or Phe or Absent or Val or Leu or Ser or Tyr
  misc_feature (1346)..(1346): Ala or Lys or Absent or Ile or Thr or Val or Gly
  misc_feature (1347)..(1347): Val or Ile or Absent or Ala or Leu or Met
  misc_feature (1348)..(1348): Absent or Gly or Val or Ile or Met or Leu or Glu
  misc_feature (1350)..(1350): Absent or Phe or His or Gln or Arg
  misc_feature (1351)..(1351): Absent or Ala or Leu or Ile or Met
  misc_feature (1352)..(1352): Absent or Lys or Arg
  misc_feature (1353)..(1353): Absent or Arg or Thr or Ala
  misc_feature (1354)..(1354): Absent or Ala or Phe or Leu
  misc_feature (1355)..(1355): Absent or Trp or Leu or Tyr
  misc_feature (1356)..(1356): Absent or Arg or Val or Ile or Ala
  misc_feature (1357)..(1357): Absent or Arg or Pro or Val or Ser or Leu or Cys or Ala
  misc_feature (1358)..(1358): Absent or His or Glu or Arg or Cys or Tyr
  misc_feature (1359)..(1359): Absent or Thr or Ala or Val or Ile or Leu
  misc_feature (1360)..(1360): Absent or Leu or Gly or Gln or Pro or Ala
  misc_feature (1361)..(1361): Absent or Phe or Ala or Asn or His
  misc_feature (1362)..(1362): Absent or Pro or Ala or Leu or Phe
  misc_feature (1363)..(1363): Absent or Asn or Asp or Ser
  misc_feature (1364)..(1364): Absent or Ser
  misc_feature (1365)..(1365): Absent or Cys
  misc_feature (1366)..(1366): Absent or Leu
  misc_feature (1367)..(1367): Absent or Ile
  misc_feature (1368)..(1368): Absent or Tyr
  misc_feature (1369)..(1369): Absent or Cys
  misc_feature (1370)..(1370): Absent or Asp
  misc_feature (1371)..(1371): Absent or Cys
  misc_feature (1372)..(1372): Absent or Tyr
  misc_feature (1373)..(1373): Absent or Met
  misc_feature (1374)..(1374): Absent or Tyr
  misc_feature (1375)..(1375): Absent or Ile
  misc_feature (1376)..(1376): Absent or Thr
  misc_feature (1377)..(1377): Absent or Val
  misc_feature (1378)..(1378): Absent or Tyr
  misc_feature (1380)..(1380): Absent or Lys or Gly or Arg or Gln or Glu
  misc_feature (1381)..(1381): Absent or Leu or Ile or Lys or Arg
  misc_feature (1382)..(1382): Absent or Thr or Arg or Phe or Leu
  misc_feature (1383)..(1383): Absent or Lys or Arg or Gly
  misc_feature (1384)..(1384): Absent or Cys or Gly or Glu
  misc_feature (1385)..(1385): Leu or Absent or Phe or Ser or Thr or Ile
  misc_feature (1386)..(1386): Ile or Val or Absent or Trp or Ser or Asn or Cys
  misc_feature (1388)..(1388): Leu or Val or Absent or Met or Phe
  misc_feature (1389)..(1389): Lys or His or Absent or Leu or Thr or Met or Phe
  misc_feature (1390)..(1390): Glu or Absent or Leu or Gly or Asn
  misc_feature (1392)..(1392): Trp or Phe or Absent or Tyr or Ala or Val or Ile or Gly
  misc_feature (1393)..(1393): Absent or Phe or Val or Leu or Ile
  misc_feature (1394)..(1394): Absent or Thr or Asn or Gln or His
  misc_feature (1395)..(1395): Absent or Tyr or Leu or Val or Met
  misc_feature (1396)..(1396): Absent or Leu or Ile or Val
  misc_feature (1399)..(1399): Absent or Ala or Gly or Lys or Arg or Gln
  misc_feature (1400)..(1400): Absent or Arg
  misc_feature (1401)..(1401): Absent or His
  misc_feature (1402)..(1402): Absent or Lys
  misc_feature (1403)..(1403): Absent or Phe
  misc_feature (1405)..(1405): Absent or Leu or Ile or Val
  misc_feature (1407)..(1407): Absent or His or Ser or Asn or Thr or Ala or Ile or Leu
  misc_feature (1408)..(1408): Absent or Pro
  misc_feature (1409)..(1409): Absent or Asn
  misc_feature (1410)..(1410): Absent or Pro
  misc_feature (1411)..(1411): Absent or Ser
  misc_feature (1412)..(1412): Absent or Thr
  misc_feature (1413)..(1413): Absent or Ala
  misc_feature (1414)..(1414): Absent or Thr
  misc_feature (1415)..(1415): Absent or Val
  misc_feature (1416)..(1416): Absent or Lys
  misc_feature (1417)..(1417): Absent or Ile
  misc_feature (1418)..(1418): Absent or Phe
  misc_feature (1421)..(1421): Absent or Tyr or Gly or Arg or Lys or Ser
  misc_feature (1423)..(1423): Absent or Ser or Cys or Phe or Thr or Val
  misc_feature (1424)..(1424): Absent or Lys or Ala or Asn or Ser
  misc_feature (1425)..(1425): Absent or Arg or Val or Lys or Thr or Ile
  misc_feature (1426)..(1426): Absent or Gly or Gln or Thr or Ala or Arg
  misc_feature (1427)..(1427): Absent or Asn or Phe or Arg or Thr
  misc_feature (1428)..(1428): Absent or Leu or Asp or Phe
  misc_feature (1429)..(1429): Absent or Gln or Met or Leu or His or Arg
  misc_feature (1430)..(1430): Absent or Glu or Ser or Arg or Gln
  misc_feature (1431)..(1431): Absent or Gly or Arg or Lys
  misc_feature (1432)..(1432): Absent or Ala or Gly
  misc_feature (1433)..(1433): Absent or Arg or Thr or Ala or Lys
  misc_feature (1434)..(1434): Absent or Asn or Ala or Ser
  misc_feature (1435)..(1435): Absent or Ala or Ser or Cys or Phe
  misc_feature (1436)..(1436): Absent or Thr or Met
  misc_feature (1437)..(1437): Absent or Asp
  misc_feature (1438)..(1438): Absent or Ala
  misc_feature (1439)..(1439): Absent or Ile
  misc_feature (1440)..(1440): Absent or Ser
  misc_feature (1441)..(1441): Absent or Leu
  misc_feature (1442)..(1442): Absent or Asp
  misc_feature (1443)..(1443): Absent or Glu
  misc_feature (1444)..(1444): Absent or Trp
  misc_feature (1445)..(1445): Absent or Glu
  misc_feature (1446)..(1446): Absent or Leu
  misc_feature (1447)..(1447): Absent or Leu
  misc_feature (1448)..(1448): Absent or Pro
  misc_feature (1449)..(1449): Absent or Asp
  misc_feature (1450)..(1450): Absent or Asn
  misc_feature (1451)..(1451): Absent or Lys
  misc_feature (1452)..(1452): Absent or Ser
  misc_feature (1453)..(1453): Absent or Ser
  misc_feature (1454)..(1454): Absent or Tyr
  misc_feature (1455)..(1455): Absent or Phe
  misc_feature (1456)..(1456): Absent or Met
  misc_feature (1457)..(1457): Absent or Glu
  misc_feature (1458)..(1458): Absent or Glu
  misc_feature (1459)..(1459): Absent or Phe
  misc_feature (1460)..(1460): Absent or Thr
  misc_feature (1461)..(1461): Absent or Ser
  misc_feature (1462)..(1462): Absent or Asp
  misc_feature (1463)..(1463): Absent or His
  misc_feature (1464)..(1464): Absent or Gly
  misc_feature (1465)..(1465): Absent or Thr
  misc_feature (1466)..(1466): Absent or Val
  misc_feature (1467)..(1467): Absent or Val
  misc_feature (1468)..(1468): Absent or Gly
  misc_feature (1469)..(1469): Absent or Lys
  misc_feature (1470)..(1470): Absent or Asp
  misc_feature (1471)..(1471): Absent or Asp or Asn
  misc_feature (1472)..(1472): Absent or Gln or Ala
  misc_feature (1473)..(1473): Absent or Ala or Phe or Arg or Gln
  misc_feature (1474)..(1474): Absent or Trp or Leu or Ala or Val
  misc_feature (1475)..(1475): Absent or Ala or Phe or Trp
  misc_feature (1476)..(1476): Absent or Ser or Gly or Ala
  misc_feature (1477)..(1477): Absent or Lys or Ala or Ser
  misc_feature (1479)..(1479): Absent or Leu or Phe or Ile
  misc_feature (1480)..(1480): Absent or Ala or Ile or Thr or Pro
  misc_feature (1486)..(1486): Absent or Glu or His or Lys or Gln
  misc_feature (1487)..(1487): Absent or Pro or Phe or Ser or Thr
  misc_feature (1490)..(1490): Absent or Ile or Ala or Ser or Leu or Gln or Asp
  misc_feature (1491)..(1491): Absent or Gly or Ser or Arg or Ala or Thr or Gln
  misc_feature (1492)..(1492): Absent or Arg or His or Gln or Ser or Ala
  misc_feature (1493)..(1493): Absent or Thr or Pro or Ala or Ser
  misc_feature (1494)..(1494): Absent or Asn or Ser or Thr or Pro or Gln
  misc_feature (1495)..(1495): Absent or Ser or Pro or Gln or Gly
  misc_feature (1496)..(1496): Absent or Thr or Tyr or Ser
  misc_feature (1497)..(1497): Absent or Asn or Asp or Leu or Gly
  misc_feature (1498)..(1498): Absent or Glu or Cys or Asn or Ser
  misc_feature (1499)..(1499): Absent or Leu or Ile
  misc_feature (1500)..(1500): Absent or Arg or Leu
  misc_feature (1501)..(1501): Absent or Asp or Gln
  misc_feature (1502)..(1502): Absent or Asp or Thr
  misc_feature (1503)..(1503): Absent or Glu or Pro
  misc_feature (1504)..(1504): Absent or Thr or His
  misc_feature (1505)..(1505): Absent or Lys or Glu
  misc_feature (1506)..(1506): Absent or Asn or Met
  misc_feature (1507)..(1507): Absent or Ile or Asp
  misc_feature (1508)..(1508): Absent or Phe or Leu
  misc_feature (1509)..(1509): Absent or Leu or Glu
  misc_feature (1510)..(1510): Absent or Pro or Glu
  misc_feature (1511)..(1511): Absent or Ile or Trp
  misc_feature (1512)..(1512): Absent or His or Glu
  misc_feature (1513)..(1513): Absent or Leu or Tyr
  misc_feature (1514)..(1514): Absent or Ser or Leu
  misc_feature (1515)..(1515): Absent or Glu or Pro
  misc_feature (1516)..(1516): Absent or Glu or Asp
  misc_feature (1517)..(1517): Absent or Val or Asp
  misc_feature (1518)..(1518): Absent or Tyr or Gly
  misc_feature (1519)..(1519): Absent or Val or Phe
  misc_feature (1520)..(1520): Absent or Gly or Leu
  misc_feature (1521)..(1521): Absent or Asp
  misc_feature (1522)..(1522): Absent or Pro or Phe
  misc_feature (1523)..(1523): Absent or Val or Ser
  misc_feature (1524)..(1524): Absent or Ile or Glu
  misc_feature (1525)..(1525): Absent or Lys or Asp
  misc_feature (1526)..(1526): Absent or Phe or Gly
  misc_feature (1527)..(1527): Absent or Lys or Gly
  misc_feature (1528)..(1528): Absent or Asp or Arg
  misc_feature (1529)..(1529): Absent or Ile or Lys
  misc_feature (1530)..(1530): Absent or Asp or Ile
  misc_feature (1531)..(1531): Absent or Val or Phe
  misc_feature (1532)..(1532): Absent or Val or Ile
  misc_feature (1533)..(1533): Absent or Lys or Arg
  misc_feature (1534)..(1534): Absent or Ile or Asp
  misc_feature (1535)..(1535): Absent or Glu or Ser
  misc_feature (1536)..(1536): Absent or Ser or Asp
  misc_feature (1537)..(1537): Absent or Tyr or Pro
  misc_feature (1538)..(1538): Absent or Arg or Asn
  misc_feature (1539)..(1539): Absent or Glu or Ser
  misc_feature (1540)..(1540): Absent or Glu or Lys
  misc_feature (1541)..(1541): Absent or Phe or Gly
  misc_feature (1542)..(1542): Absent or Val
  misc_feature (1543)..(1543): Absent or Pro or Phe
  misc_feature (1544)..(1544): Absent or Lys or Asp
  misc_feature (1545)..(1545): Absent or Val or Met
  misc_feature (1546)..(1546): Absent or Thr or Asn
  misc_feature (1547)..(1547): Absent or Glu or Tyr
  misc_feature (1548)..(1548): Absent or Ile or Phe
  misc_feature (1549)..(1549): Absent or Phe or Ile
  misc_feature (1550)..(1550): Absent or Asp or Cys
  misc_feature (1551)..(1551): Absent or Ala or Pro
  misc_feature (1552)..(1552): Absent or Glu or Thr
  misc_feature (1553)..(1553): Absent or Glu or Pro
  misc_feature (1554)..(1554): Absent or Glu or Lys
  misc_feature (1555)..(1555): Absent or Ala or Arg
  misc_feature (1556)..(1556): Absent or Glu
  misc_feature (1557)..(1557): Absent or Met or Thr
  misc_feature (1558)..(1558): Absent or Ile or Trp
  misc_feature (1559)..(1559): Absent or Lys or Val
  misc_feature (1560)..(1560): Absent or Ser or Glu
  misc_feature (1561)..(1561): Absent or Pro
  misc_feature (1562)..(1562): Absent or Val or Pro
  misc_feature (1563)..(1563): Absent or Ser or Pro
  misc_feature (1564)..(1564): Absent or Ala or Leu
  misc_feature (1565)..(1565): Absent or Glu or Ser
  misc_feature (1566)..(1566): Absent or Glu or Pro
  misc_feature (1567)..(1567): Absent or Val or Arg
  misc_feature (1568)..(1568): Absent or Asp or Leu
  misc_feature (1569)..(1569): Absent or Val or Pro
  misc_feature (1570)..(1570): Absent or Asp or Lys
  misc_feature (1571)..(1571): Absent or Asp or Gln
  misc_feature (1572)..(1572): Absent or Asp or Leu
  misc_feature (1573)..(1573): Absent or Asp or Leu
  misc_feature (1574)..(1574): Absent or Glu or Pro
  misc_feature (1575)..(1575): Absent or Val or Leu
  misc_feature (1576)..(1576): Absent or Met or Gln
  misc_feature (1577)..(1577): Absent or Ala or Ile
  misc_feature (1578)..(1578): Absent or Met or Arg
  misc_feature (1579)..(1579): Absent or Val or Leu
  misc_feature (1580)..(1580): Absent or Ala or Asp
  misc_feature (1581)..(1581): Absent or Pro
  misc_feature (1582)..(1582): Absent or Asp or Pro
  misc_feature (1583)..(1583): Absent or Gln or Pro
  misc_feature (1584)..(1584): Absent or Cys or Ile
  misc_feature (1585)..(1585): Absent or Val
  misc_feature (1586)..(1586): Absent or Glu or Asp
  misc_feature (1587)..(1587): Absent or Glu
  misc_feature (1588)..(1588): Absent or Glu
  misc_feature (1589)..(1589): Absent or Glu or Val
  misc_feature (1590)..(1590): Absent or Gly or Val
  misc_feature (1591)..(1591): Absent or Ala or Lys
  misc_feature (1592)..(1592): Absent or Gln or His
  misc_feature (1593)..(1593): Absent or Lys or Ile
  misc_feature (1594)..(1594): Absent or Asp or Thr
  misc_feature (1595)..(1595): Absent or Lys
  misc_feature (1596)..(1596): Absent or Glu or Ile
  misc_feature (1597)..(1597): Absent or His or Pro
  misc_feature (1598)..(1598): Absent or Asn or Leu
  misc_feature (1599)..(1599): Absent or Gly or Gln
  misc_feature (1600)..(1600): Absent or Phe or Ile
  misc_feature (1601)..(1601): Absent or Ser or Glu
  misc_feature (1602)..(1602): Absent or Val or Ala
  misc_feature (1603)..(1603): Absent or Gly or Leu
  misc_feature (1604)..(1604): Absent or Lys or Pro
  misc_feature (1605)..(1605): Absent or Leu or Pro
  misc_feature (1606)..(1606): Absent or Arg or Pro
  misc_feature (1607)..(1607): Absent or Val
  misc_feature (1608)..(1608): Absent or Asn or Ile
  misc_feature (1609)..(1609): Absent or Gly or Arg
  misc_feature (1610)..(1610): Absent or Val
  misc_feature (1611)..(1611): Absent or Gly or Pro
  misc_feature (1612)..(1612): Absent or Ala or Ser
  misc_feature (1613)..(1613): Absent or Leu
  misc_feature (1614)..(1614): Absent or Cys or Glu
  misc_feature (1615)..(1615): Absent or Ser or Ala
  misc_feature (1616)..(1616): Absent or Phe or Leu
  misc_feature (1617)..(1617): Absent or Gly or Lys
  misc_feature (1618)..(1618): Absent or Val or Glu
  misc_feature (1619)..(1619): Absent or Ala
  misc_feature (1620)..(1620): Absent or Ala or Asp
  misc_feature (1621)..(1621): Absent or Ala or Gln
  misc_feature (1622)..(1622): Absent or Thr or Asp
  misc_feature (1623)..(1623): Absent or Leu or Thr
  misc_feature (1624)..(1624): Absent or Cys or Val
  misc_feature (1625)..(1625): Absent or Ile or Ser
  misc_feature (1626)..(1626): Absent or Phe or Gln
  misc_feature (1627)..(1627): Absent or Leu or Val
  misc_feature (1628)..(1628): Absent or Leu or Phe
  misc_feature (1629)..(1629): Absent or Gly or Phe
  misc_feature (1630)..(1630): Absent or Gly or Lys
  misc_feature (1631)..(1631): Absent or Arg or Lys
  misc_feature (1632)..(1632): Absent or Gln or Met
  misc_feature (1633)..(1633): Absent or Gln or Lys
  misc_feature (1634)..(1634): Absent or Gln or Glu
  misc_feature (1635)..(1635): Absent or Leu or Asn
  misc_feature (1636)..(1636): Absent or His or Glu
  misc_feature (1637)..(1637): Absent or Lys or Phe
  misc_feature (1638)..(1638): Absent or Thr or Val
  misc_feature (1639)..(1639): Absent or Gln or Asp
  misc_feature (1640)..(1640): Absent or Asn or Met
  misc_feature (1641)..(1641): Absent or Gln or Lys
  misc_feature (1642)..(1642): Absent or Lys or Met
  misc_feature (1643)..(1643): Absent or Thr or Asp
  misc_feature (1644)..(1644): Absent or Pro or Ser
  misc_feature (1645)..(1645): Absent or Phe or Pro
  misc_feature (1646)..(1646): Absent or Gln or Lys
  misc_feature (1647)..(1647): Absent or Met or Ser
  misc_feature (1648)..(1648): Absent or Tyr or Gly
  misc_feature (1649)..(1649): Absent or Ala or Ser
  misc_feature (1650)..(1650): Absent or Asp or Arg
  misc_feature (1651)..(1651): Absent or Asn or Gly
  misc_feature (1652)..(1652): Absent or Glu or Ile
  misc_feature (1653)..(1653): Absent or Arg or Leu
  misc_feature (1654)..(1654): Absent or Ile or Pro
  misc_feature (1655)..(1655): Absent or Gln
  misc_feature (1656)..(1656): Absent or Gln or Ile
  misc_feature (1657)..(1657): Absent or Val or Glu
  misc_feature (1658)..(1658): Absent or Val or Ala
  misc_feature (1659)..(1659): Absent or Gln or Gly
  misc_feature (1660)..(1660): Absent or Gln or Gly
  misc_feature (1661)..(1661): Absent or Ala or Phe
  misc_feature (1662)..(1662): Absent or Ser or Gln
  misc_feature (1663)..(1663): Absent or Arg or Phe
  misc_feature (1664)..(1664): Absent or Leu or Glu
  misc_feature (1665)..(1665): Absent or Asn or Glu
  misc_feature (1666)..(1666): Absent or Gln or Lys
  misc_feature (1667)..(1667): Absent or Ala or Asp
  misc_feature (1668)..(1668): Absent or Val or Glu
  misc_feature (1669)..(1669): Absent or Ser or Lys
  misc_feature (1670)..(1670): Absent or Thr or Met
  misc_feature (1671)..(1671): Absent or Val or Glu
  misc_feature (1672)..(1672): Absent or Met or Asn
  misc_feature (1673)..(1673): Absent or Gly or Thr
  misc_feature (1674)..(1674): Absent or Gly or His
  misc_feature (1675)..(1675): Absent or Ala or Asn
  misc_feature (1676)..(1676): Absent or Ser or Pro
  misc_feature (1677)..(1677): Absent or Thr or Ser
  misc_feature (1678)..(1678): Absent or Arg or Lys
  misc_feature (1679)..(1679): Absent or Ala or Lys
  misc_feature (1680)..(1680): Absent or Ser or Asn
  misc_feature (1681)..(1681): Absent or Ile or Asn
  misc_feature (1682)..(1682): Absent or Ser or Leu
  misc_feature (1683)..(1683): Absent or Phe or Gly
  misc_feature (1684)..(1684): Absent or Gly or Pro
  misc_feature (1685)..(1685): Absent or Gly or Ala
  misc_feature (1686)..(1686): Absent or Tyr or Pro
  misc_feature (1687)..(1687): Absent or Tyr or Gly
  misc_feature (1688)..(1688): Absent or Asp or Pro
  misc_feature (1689)..(1689): Absent or Gly or Asp
  misc_feature (1690)..(1690): Absent or Phe or Ile
  misc_feature (1691)..(1691): Absent or Lys
  misc_feature (1692)..(1692): Absent or Glu
  misc_feature (1693)..(1693): Absent or Asp
  misc_feature (1694)..(1694): Absent or Glu
  misc_feature (1695)..(1695): Absent or Glu
  misc_feature (1696)..(1696): Absent or Gly
  misc_feature (1697)..(1697): Absent or Ser
  misc_feature (1698)..(1698): Absent or Trp
  misc_feature (1699)..(1699): Absent or Thr
  misc_feature (1700)..(1700): Absent or Glu
  misc_feature (1701)..(1701): Absent or Ser
  misc_feature (1702)..(1702): Absent or Ser
  misc_feature (1703)..(1703): Absent or Gly
  misc_feature (1704)..(1704): Absent or Arg
  misc_feature (1705)..(1705): Absent or Phe
  misc_feature (1706)..(1706): Absent or Asn
  misc_feature (1707)..(1707): Absent or Val
  misc_feature (1708)..(1708): Absent or Trp
  misc_feature (1709)..(1709): Absent or Lys
  misc_feature (1710)..(1710): Absent or Trp
  misc_feature (1711)..(1711): Absent or Ser
  misc_feature (1712)..(1712): Absent or Leu
  misc_feature (1713)..(1713): Absent or Thr
  misc_feature (1714)..(1714): Absent or Gly
  misc_feature (1715)..(1715): Absent or Ile
  misc_feature (1716)..(1716): Absent or Gly
  misc_feature (1717)..(1717): Absent or Ala
  misc_feature (1718)..(1718): Absent or Leu
  misc_feature (1719)..(1719): Absent or Cys
  misc_feature (1720)..(1720): Absent or Ser
  misc_feature (1721)..(1721): Absent or Phe
  misc_feature (1722)..(1722): Absent or Gly
  misc_feature (1723)..(1723): Absent or Val
  misc_feature (1724)..(1724): Absent or Ala
  misc_feature (1725)..(1725): Absent or Ala
  misc_feature (1726)..(1726): Absent or Thr
  misc_feature (1727)..(1727): Absent or Thr
  misc_feature (1728)..(1728): Absent or Ile
  misc_feature (1729)..(1729): Absent or Cys
  misc_feature (1730)..(1730): Absent or Ile
  misc_feature (1731)..(1731): Absent or Ile
  misc_feature (1732)..(1732): Absent or Ile
  misc_feature (1733)..(1733): Absent or Phe
  misc_feature (1734)..(1734): Absent or Ala
  misc_feature (1735)..(1735): Absent or Ser
  misc_feature (1736)..(1736): Absent or Ser
  misc_feature (1737)..(1737): Absent or Gln
  misc_feature (1738)..(1738): Absent or Arg
  misc_feature (1739)..(1739): Absent or Asn
  misc_feature (1740)..(1740): Absent or Lys
  misc_feature (1741)..(1741): Absent or His
  misc_feature (1742)..(1742): Absent or His
  misc_feature (1743)..(1743): Absent or Gln
  misc_feature (1744)..(1744): Absent or His
  misc_feature (1745)..(1745): Absent or Asn
  misc_feature (1746)..(1746): Absent or Gln
  misc_feature (1747)..(1747): Absent or Arg
  misc_feature (1748)..(1748): Absent or Leu
  misc_feature (1749)..(1749): Absent or Arg
  misc_feature (1750)..(1750): Absent or Phe
  misc_feature (1751)..(1751): Absent or Gln
  misc_feature (1752)..(1752): Absent or Ile
  misc_feature (1753)..(1753): Absent or Ile
  misc_feature (1754)..(1754): Absent or Thr
  misc_feature (1755)..(1755): Absent or Asp
  misc_feature (1756)..(1756): Absent or Asp
  misc_feature (1757)..(1757): Absent or Lys
  misc_feature (1758)..(1758): Absent or Arg
  misc_feature (1759)..(1759): Absent or Ile
  misc_feature (1760)..(1760): Absent or Lys
  misc_feature (1761)..(1761): Absent or Arg
  misc_feature (1762)..(1762): Absent or Val
  misc_feature (1763)..(1763): Absent or Val
  misc_feature (1764)..(1764): Absent or His
  misc_feature (1765)..(1765): Absent or His
  misc_feature (1766)..(1766): Absent or Ala
  misc_feature (1767)..(1767): Absent or Thr
  misc_feature (1768)..(1768): Absent or Gln
  misc_feature (1769)..(1769): Absent or Leu
  misc_feature (1770)..(1770): Absent or Asn
  misc_feature (1771)..(1771): Absent or Glu
  misc_feature (1772)..(1772): Absent or Ala
  misc_feature (1773)..(1773): Absent or Phe
  misc_feature (1774)..(1774): Absent or Ser
  misc_feature (1775)..(1775): Absent or Ala
  misc_feature (1776)..(1776): Absent or Val
  misc_feature (1777)..(1777): Absent or Arg
  misc_feature (1778)..(1778): Absent or Gly
  misc_feature (1779)..(1779): Absent or Val
  misc_feature (1780)..(1780): Absent or Pro
  misc_feature (1781)..(1781): Absent or Leu
  misc_feature (1782)..(1782): Absent or Thr
  misc_feature (1783)..(1783): Absent or Arg
  misc_feature (1784)..(1784): Absent or Ala
  misc_feature (1785)..(1785): Absent or His
  misc_feature (1786)..(1786): Absent or Ile
  misc_feature (1787)..(1787): Absent or Thr
  misc_feature (1788)..(1788): Absent or Phe
  misc_feature (1789)..(1789): Absent or Gly
  misc_feature (1790)..(1790): Absent or Gly
  misc_feature (1791)..(1791): Absent or Tyr
  misc_feature (1792)..(1792): Absent or Tyr
  misc_feature (1793)..(1793): Absent or Asp
  misc_feature (1794)..(1794): Absent or Gly
  misc_feature (1795)..(1795): Absent or Leu
  unsure (1)..(1795): unsure at all Xaa locations
XXXXXXXXXXXXXXXXXXXXXXXXXXXXXXXXXXXXXXXXXXXXXXXXXXXXXXXXXXXXXXXXXXXXXXXXXXXXXXXXXXXXXXXXXXXXXXXXXXXXXXXXXXXXXXXXXXXXXXXXXXXXXXXXXXXXXXXXXXXXXXXXXXXXXXXXXXXXXXXXXXXXXXXXXXXXXXXXXXXXXXXXXXXXXXXXXXXXXXXXXXXXXXXXXXXXXXXXXXXXXXXXXXXXXXXXXXXXXXXXXXXXXXXXXXXXXXXXXXXXXXXXXXXXXXXXXXXXXXXXXXXXXXXXXXXXXXXXXXXXXXXXXXXXXXXXXXXXXXXXXXXXXXXXXXXXXXXXXXXXXXXXXXXXXXXXXXXXXXXXXXXXXXXXXXXXXXXXXXXXXXXXXXXXXXXXXXXXXXXXXXXXXXXXXXXXXXXXXXXXXXXXXXXXXXXXXXXXXXXXXXXXXXXXXXXXXXXXXXXXXXXXXXXXXXXXXXXXXXXXXXXXXXXXXXXXXXXXXXXXXXXXXXXXXXXXXXXXXXXXXXXXXXXXXXXXXXXXXXXXXXXXXXXXXXXXXXXXXXXXXXXXXXXXXXXXXXXXXXXXXXXXXXXXXXXXXXXXXXXXXXXXXXXXXXXXXXXXXXXXXXXXXXXXXXXXXXXXXXXXXXXXXXXXXXXXXXXXXXXXXXXXXXXXXXXXXXXXXXXXXXXXXXXXXXXXXXXXXXXXXXXXXXXXXXXXXXXXXXXXXXXXXXXXXXXXXXXXXXXXXXXXXXXXXXXXXXXXXXXXXXXXXXXXXXXXXXXXXXXXXXXXXXXXXXXXXXXXXXXXXXXXXXXXXXXXXXXXXXXXXXXXXXXXXXXXXXXXXXXXXXXXXXXXXXXXXXXXXXXXXXXXXXXXXXXXXXXXXXXXXXXXXXXXXXXXXXXXXXXXXXXXXXXXXXXXXXXXXXXXXXXXXXXXXXXXXXXXXXXXXXXXXXXXXXXXXXXXXXXXXXXXXXXXXXXXXXXXXXXXXXXXXXXXXXXXXXXXXXXXXXXXXXXXXXXXXXXXXXXXXXXXXXXXXXXXXXXXXXXXXXXXXXXXXXXXXXXXXXXXXXXXXXXXXXXXXXXXXXXXXXXXXXXCPXXXXXXXXPPXXXXXXXXXXXXXXXXXXXXXXXXXXXXXXXXXXXXXXXXXXXXXXXXXXXXXXXXXXXVXGXXLDXXXXXXXXXXXXXXSXLFYAXWCPFSXXXRPXFXXLSSMFPXIXHXXXEXSXAXPSXFSRYGXXSXPXILXVNXTXXXXRYXGXKDLXSLXXFYXXXTGXXXXXXXXXXXXXXXXXXXXPXXYXXXXXXXXXXXXXXXXXXXXXWXXXXXSXXEXXXXXPXLXLXXXFXXLXXXXXXXXPXXXSXXXXXXXXXXXXXXXXXXXXXXXXXXXXXLXXXXXXXQXXXRXXXXXDVXXXXXRXWXXXXXXXXXXXXKLXLXXXXXXXXXXXXXXXXXXXXXXXXXXXXXXXXXXXXXXXXXXXXXXXXXXXXXXXSXXSVSLGXXSSXXXXXXXXXXXXXXXXXXXXXXXXXXXXXXXXXXXXXXXXXXXXXXXXXXXXXXXXXXXXXXXXXXXXXXXXXXXXXXXXXXXXXXXXXXXXXXXXXXXXXXXXXXXXXXXXXXXXXXXXXXXXXXXXXXXXXXXXXXXXXXXXXXXXXXXXXXXXXXXXXXXXXXXXXXXXXXXXXXXXXXXXXXXXXXXXXXXXXXXXXXXXXXXXXXXXXXXXXXXXXXXXXXXXXXXXXXXXXXXXXXXXXXXXXXXXXXXXXXXXXXXXXXXXXXXXXXXXXXXXXXXXXXXXXXXXXXXXXXXXXXXXXX

SEQ ID NO: 36449 - protein, 303 aa, Artificial sequence
  consensus sequence of seq id no: 316 and its homologs
  misc_feature (1)..(1): Absent or Met
  misc_feature (2)..(2): Absent or Asp
  misc_feature (3)..(3): Absent or Asn
  misc_feature (4)..(4): Absent or Arg
  misc_feature (5)..(5): Absent or Ser
  misc_feature (6)..(6): Absent or Asn or Met
  misc_feature (8)..(8): Ser or Ala or Lys or Gly or Val or Absent
  misc_feature (9)..(9): Arg or Ser or Glu or Gly or Absent
  misc_feature (10)..(10): Glu or Ala or Absent
  misc_feature (12)..(12): Thr or Ala or Glu or Pro or Ser or Absent
  misc_feature (13)..(13): Asp or Glu or Absent or Val or Ala
  misc_feature (14)..(14): Ala or Pro or Glu or Absent or Ser or X
  misc_feature (15)..(15): Ser or Glu or Absent or Gly
  misc_feature (16)..(16): Ser or Asn or Absent or Ala or Gly
  misc_feature (17)..(17): Absent or Glu or Gly
  misc_feature (18)..(18): Absent or Asn or Ala
  misc_feature (19)..(19): Absent or Lys or Ala
  misc_feature (20)..(20): Absent or Asn or Ala
  misc_feature (21)..(21): Ser or Lys or Absent or Ala
  misc_feature (22)..(22): Gly or Asn or Ala or Absent or Val
  misc_feature (23)..(23): Thr or Ala or Lys or Ser or Absent
  misc_feature (25)..(25): Ser or Ala or Lys or Gly or Absent
  misc_feature (28)..(28): Glu or Ala or Gly or Ser or Ile or Met or Absent or Val
  misc_feature (29)..(29): Thr or Ile or Glu or Pro or Absent
  misc_feature (30)..(30): Lys or Gly or Ala or Absent
  misc_feature (31)..(31): Ile or Gly or Leu or Pro or Absent
  misc_feature (34)..(34): Thr or Ser or Lys or Arg or Absent
  misc_feature (47)..(47): Val or Ile or Asn or Met or Absent
  misc_feature (49)..(49): Arg or Lys or Absent
  misc_feature (53)..(53): Gln or Arg or Ser or Phe or Tyr or Absent
  misc_feature (56)..(56): Ile or Val or Arg or Absent
  misc_feature (58)..(58): Leu or Ile or Val or Ala or Absent or Cys
  misc_feature (60)..(60): Leu or Absent or Gly
  misc_feature (65)..(65): Glu or Asp or Leu or Absent or Ile
  misc_feature (68)..(68): Absent or Gly
  misc_feature (69)..(69): Absent or Leu
  misc_feature (70)..(70): Absent or Ile
  misc_feature (71)..(71): Absent or Gly
  misc_feature (72)..(72): Absent or Glu
  misc_feature (73)..(73): Absent or Ser
  misc_feature (74)..(74): Absent or His
  misc_feature (75)..(75): Absent or Glu
  misc_feature (76)..(76): Absent or Thr
  misc_feature (77)..(77): Absent or Val
  misc_feature (78)..(78): Absent or Val
  misc_feature (79)..(79): Absent or Val
  misc_feature (80)..(80): Absent or Trp
  misc_feature (81)..(81): Absent or Phe
  misc_feature (82)..(82): Absent or Gly
  misc_feature (83)..(83): Absent or Ala
  misc_feature (84)..(84): Absent or Pro
  misc_feature (87)..(87): Tyr or Asn or Absent or Gly or Ser
  misc_feature (88)..(88): Ser or Ile or Tyr or Absent or Phe
  misc_feature (91)..(91): Asn or Gly or Ala or Absent or Asp or Glu
  misc_feature (94)..(94): Asp or Glu or Arg or Lys
  misc_feature (98)..(98): Val or Ala or Ser or Ile or Thr
  misc_feature (106)..(106): Tyr or Asp or Ser or Arg or Gln
  misc_feature (116)..(116): Ala or Thr or Val or His or Ile or Met
  misc_feature (119)..(119): Glu or Ser or Asn or Asp or Val
  misc_feature (120)..(120): Val or Absent or Asp
  misc_feature (121)..(121): Ser or Asn or Absent
  misc_feature (122)..(122): Ser or Lys or Absent or Arg
  misc_feature (124)..(124): Gln or His or Leu or Gly or Ala
  misc_feature (125)..(125): Ser or Leu or Lys or Gln or Arg
  misc_feature (126)..(126): Met or Thr or Asn or Gly or Ser
  misc_feature (129)..(129): Ile or Thr or Gln or Absent or Gly or Asn or Lys
  misc_feature (130)..(130): Glu or Asp or Val or Absent
  misc_feature (131)..(131): Ser or Thr or Absent or Gly or Ala
  misc_feature (133)..(133): Ala or Asn or Thr or Absent
  misc_feature (139)..(139): Val or Phe or Gly or Arg or Gln
  misc_feature (149)..(149): Pro or Val or Leu or Met
  misc_feature (152)..(152): Absent or Gln or Ala or Lys or Arg
  misc_feature (154)..(154): Gln or Thr or Ser or Pro
  misc_feature (155)..(155): Glu or Ala or Pro or Ser or Gln
  misc_feature (156)..(156): Arg or Ser or Asn or Ala
  misc_feature (157)..(157): Pro or Ala or Asn or Val
  misc_feature (159)..(159): Lys or Arg or Ala or Pro or Gln or His
  misc_feature (161)..(161): Asp or Val or Thr or Pro or Ser
  misc_feature (162)..(162): Ser or Gly or His or Ala or Thr
  misc_feature (163)..(163): Ser or Pro or Gly or His or Arg
  misc_feature (164)..(164): Asn or Absent
  misc_feature (165)..(165): Ile or Ala or Absent or Pro
  misc_feature (166)..(166): Met or Leu or Absent or Val or Lys or Tyr
  misc_feature (167)..(167): Pro or Absent or Thr or Arg
  misc_feature (168)..(168): Arg or Absent or Lys
  misc_feature (169)..(169): Pro or Absent or Asp or Glu
  misc_feature (170)..(170): Absent or Ala
  misc_feature (171)..(171): Absent or Ala
  misc_feature (172)..(172): Absent or Ala
  misc_feature (173)..(173): Absent or Ala
  misc_feature (174)..(174): Absent or Ala
  misc_feature (175)..(175): Absent or Ala
  misc_feature (176)..(176): Absent or Ala
  misc_feature (177)..(177): Absent or Thr or Ala
  misc_feature (178)..(178): Absent or Thr
  misc_feature (179)..(179): Absent or Arg or Gln or Ser
  misc_feature (180)..(180): Ser or Pro or Absent
  misc_feature (181)..(181): Ser or Absent or His or Gln or Leu or Arg
  misc_feature (182)..(182): Ser or Absent or Gln or Glu
  misc_feature (183)..(183): Ile or Absent or Gln
  misc_feature (185)..(185): Ser or Gly or Absent or Gln
  misc_feature (186)..(186): Met or Leu or Absent or Gln
  misc_feature (187)..(187): Asp or Gly or Absent or Arg
  misc_feature (188)..(188): Val or Gly or Absent or Pro
  misc_feature (189)..(189): Gly or Absent or Ala or Gln
  misc_feature (190)..(190): Gly or Absent or Asn or Gln
  misc_feature (192)..(192): Ser or Absent or Ala or Thr
  misc_feature (193)..(193): Ala or Absent or Arg or Gly
  misc_feature (194)..(194): Asn or Asp or Absent or Gln
  misc_feature (195)..(195): Glu or Absent or Asp
  misc_feature (197)..(197): Ala or Absent or Leu or Met or Tyr
  misc_feature (198)..(198): Thr or Absent or Glu or Ala
  misc_feature (200)..(200): Absent or Lys
  misc_feature (201)..(201): Absent or Val or Ala
  misc_feature (202)..(202): Absent or Thr or Ser
  misc_feature (203)..(203): Absent or Val or Phe
  misc_feature (204)..(204): Absent or His or Gln
  misc_feature (205)..(205): Absent or Ser
  misc_feature (206)..(206): Absent or Phe
  misc_feature (207)..(207): Absent or Ser
  misc_feature (208)..(208): Absent or Leu
  misc_feature (209)..(209): Absent or Ser
  misc_feature (210)..(210): Absent or Pro
  misc_feature (211)..(211): Absent or Ala
  misc_feature (212)..(212): Absent or Pro
  misc_feature (213)..(213): Absent or Thr
  misc_feature (214)..(214): Absent or Arg
  misc_feature (215)..(215): Absent or Ile
  misc_feature (216)..(216): Absent or Tyr
  misc_feature (217)..(217): Absent or Cys
  misc_feature (218)..(218): Absent or Leu
  misc_feature (219)..(219): Absent or Ala or Ile
  misc_feature (220)..(220): Absent or Asp or Ser
  misc_feature (221)..(221): Absent or Val or Pro
  misc_feature (222)..(222): Absent or Tyr or Ser
  misc_feature (223)..(223): Absent or Gly or Cys
  misc_feature (224)..(224): Absent or Trp or Cys
  misc_feature (225)..(225): Absent or His or Cys
  misc_feature (226)..(226): Leu or Phe or Absent or Arg
  misc_feature (229)..(229): Thr or Ser or Absent or Lys or Arg
  misc_feature (231)..(231): Arg or Absent or Glu or Ala
  misc_feature (232)..(232): Absent or X
  misc_feature (233)..(233): Absent or Gly
  misc_feature (238)..(238): Ala or Absent or Gly
  misc_feature (240)..(240): Val or Absent or Ala
  misc_feature (241)..(241): Asn or Absent or Met or Lys
  misc_feature (243)..(243): Val or Absent or Ile or Leu
  misc_feature (244)..(244): Gly or Absent or Glu or Asn
  misc_feature (245)..(245): Arg or Absent or Gln or Lys
  misc_feature (246)..(246): Val or Absent or Gln or Thr
  misc_feature (247)..(247): Ala or Absent or Ser or Gly
  misc_feature (248)..(248): Asn or Ser or Absent or Ala or Thr or Ile
  misc_feature (249)..(249): Asn or Absent or Leu or Tyr
  misc_feature (251)..(251): Arg or Absent or Gln or Lys
  misc_feature (252)..(252): Ser or Arg or Glu or Absent or Gln
  misc_feature (253)..(253): Thr or Glu or His or Asn or Absent
  misc_feature (254)..(254): Ile or Asp or Glu or Absent or Val
  misc_feature (255)..(255): Asp or Cys or Glu or His or Absent or Ala
  misc_feature (256)..(256): Lys or Glu or Asp or Absent
  misc_feature (258)..(258): Phe or Leu or Absent
  misc_feature (259)..(259): Thr or Absent or Asp or Tyr or Ser
  misc_feature (260)..(260): Ser or Absent or Trp or His or Pro
  misc_feature (262)..(262): Gln or Absent or Thr or Arg
  misc_feature (264)..(264): Arg or Absent or Asp or Pro
  misc_feature (266)..(266): Lys or Absent or Val or Pro
  misc_feature (267)..(267): Pro or Ala or Absent or Val or Lys or Gly
  misc_feature (268)..(268): Absent or Leu or Gln or Met
  misc_feature (269)..(269): Absent or Gln
  misc_feature (270)..(270): Absent or Arg
  misc_feature (271)..(271): Absent or Thr
  misc_feature (272)..(272): Absent or Leu
  misc_feature (273)..(273): Absent or Ser
  misc_feature (274)..(274): Absent or Cys
  misc_feature (275)..(275): Absent or Gly
  misc_feature (276)..(276): Absent or Val
  misc_feature (277)..(277): Absent or Val
  misc_feature (278)..(278): Absent or Leu
  misc_feature (279)..(279): Absent or Ser
  misc_feature (280)..(280): Absent or Glu
  misc_feature (281)..(281): Absent or Phe
  misc_feature (282)..(282): Absent or Leu
  misc_feature (283)..(283): Absent or Leu
  misc_feature (284)..(284): Absent or Leu
  misc_feature (285)..(285): Absent or Tyr
  misc_feature (286)..(286): Absent or Thr
  misc_feature (287)..(287): Absent or Cys
  misc_feature (288)..(288): Absent or Leu
  misc_feature (289)..(289): Absent or Ile
  misc_feature (290)..(290): Absent or Phe
  misc_feature (291)..(291): Absent or Ala
  misc_feature (292)..(292): Absent or Ile
  misc_feature (293)..(293): Absent or Tyr
  misc_feature (294)..(294): Absent or Ile
  misc_feature (295)..(295): Absent or Glu
  misc_feature (296)..(296): Absent or Thr
  misc_feature (297)..(297): Absent or Thr
  misc_feature (298)..(298): Absent or Gly
  misc_feature (299)..(299): Absent or Val
  misc_feature (300)..(300): Absent or Trp
  misc_feature (301)..(301): Absent or Leu
  misc_feature (302)..(302): Absent or Cys
  misc_feature (303)..(303): Absent or Thr
  unsure (1)..(303): unsure at all Xaa locations
XXXXXXMXXXSXXXXXXXXXXXXGXPSXXXXPRXGKSCKGCLYYSSXLXSRGXNPXCXGXIPRSXPQXXXXXXXXXXXXXXXXXVPXXVVXEPXEEAXAQGHDLRXFKYACAGYSXFVXXXXDXXXGEXXXKXLLPYCXGLELLVDSRXVEXKXXXXEXAXXXXXXXXXXXXXXXXXXXXXXXGXXXXXXLXXXXFXXRXXXXXXXXXXXXXXXXXXXXXXXXXXXFRXSXXXLVASXVXXNXXXXXXXIXXXXXXIXXXDXRXPXXXXXXXXXXXXXXXXXXXXXXXXXXXXXXXXXXXXXX

SEQ ID NO: 36450 - protein, 1346 aa, Artificial sequence
  consensus sequence of seq id no: 333 and its homologs
  misc_feature (1)..(1): Absent or Met
  misc_feature (2)..(2): Absent or Pro
  misc_feature (3)..(3): Absent or Arg
  misc_feature (4)..(4): Absent or Ser
  misc_feature (5)..(5): Absent or Thr
  misc_feature (6)..(6): Absent or Asp
  misc_feature (7)..(7): Absent or Arg
  misc_feature (8)..(8): Absent or Ser
  misc_feature (9)..(9): Absent or Pro
  misc_feature (10)..(10): Absent or Ser
  misc_feature (11)..(11): Absent or Pro
  misc_feature (12)..(12): Absent or Arg
  misc_feature (13)..(13): Absent or Arg
  misc_feature (14)..(14): Absent or Glu
  misc_feature (15)..(15): Absent or Glu
  misc_feature (16)..(16): Absent or Arg
  misc_feature (17)..(17): Absent or Arg
  misc_feature (18)..(18): Absent or Arg
  misc_feature (19)..(19): Absent or Ser
  misc_feature (20)..(20): Absent or Arg
  misc_feature (21)..(21): Absent or Ser
  misc_feature (22)..(22): Absent or Arg
  misc_feature (23)..(23): Absent or Ser
  misc_feature (24)..(24): Absent or Pro
  misc_feature (25)..(25): Absent or Arg
  misc_feature (26)..(26): Absent or Arg
  misc_feature (27)..(27): Absent or Arg
  misc_feature (28)..(28): Absent or Arg
  misc_feature (29)..(29): Absent or Tyr
  misc_feature (30)..(30): Absent or Asp
  misc_feature (31)..(31): Absent or Asp
  misc_feature (32)..(32): Absent or Asp
  misc_feature (33)..(33): Absent or Arg
  misc_feature (34)..(34): Absent or Asp
  misc_feature (35)..(35): Absent or Arg
  misc_feature (36)..(36): Absent or Asp
  misc_feature (37)..(37): Absent or Arg
  misc_feature (38)..(38): Absent or Gly
  misc_feature (39)..(39): Absent or Arg
  misc_feature (40)..(40): Absent or Lys
  misc_feature (41)..(41): Absent or Lys
  misc_feature (42)..(42): Absent or Gln
  misc_feature (43)..(43): Absent or Ser
  misc_feature (44)..(44): Absent or Gly
  misc_feature (45)..(45): Absent or Phe
  misc_feature (46)..(46): Absent or Arg
  misc_feature (47)..(47): Absent or Trp
  misc_feature (48)..(48): Absent or Lys
  misc_feature (49)..(49): Absent or Glu
  misc_feature (50)..(50): Absent or Lys
  misc_feature (51)..(51): Absent or Pro
  misc_feature (52)..(52): Absent or Arg
  misc_feature (53)..(53): Absent or Arg
  misc_feature (54)..(54): Absent or Asp
  misc_feature (55)..(55): Absent or Asp
  misc_feature (56)..(56): Absent or Asp
  misc_feature (57)..(57): Absent or Ile
  misc_feature (58)..(58): Absent or Ser
  misc_feature (59)..(59): Absent or Gly
  misc_feature (60)..(60): Absent or Arg
  misc_feature (61)..(61): Absent or Glu
  misc_feature (62)..(62): Absent or Pro
  misc_feature (63)..(63): Absent or Glu
  misc_feature (64)..(64): Absent or Arg
  misc_feature (65)..(65): Absent or Gly
  misc_feature (66)..(66): Absent or Leu
  misc_feature (67)..(67): Absent or Glu
  misc_feature (68)..(68): Absent or Arg
  misc_feature (69)..(69): Absent or Gly
  misc_feature (70)..(70): Absent or Tyr
  misc_feature (71)..(71): Absent or Arg
  misc_feature (72)..(72): Absent or Glu
  misc_feature (73)..(73): Absent or Arg
  misc_feature (74)..(74): Absent or Asp
  misc_feature (75)..(75): Absent or Arg
  misc_feature (76)..(76): Absent or Ala
  misc_feature (77)..(77): Absent or Arg
  misc_feature (78)..(78): Absent or Ser
  misc_feature (79)..(79): Absent or Pro
  misc_feature (80)..(80): Absent or Phe
  misc_feature (81)..(81): Absent or Arg
  misc_feature (82)..(82): Absent or Asp
  misc_feature (83)..(83): Absent or Arg
  misc_feature (84)..(84): Absent or Asp
  misc_feature (85)..(85): Absent or Arg
  misc_feature (86)..(86): Absent or Asp
  misc_feature (87)..(87): Absent or Tyr
  misc_feature (88)..(88): Absent or Gly
  misc_feature (89)..(89): Absent or Arg
  misc_feature (90)..(90): Absent or Gly
  misc_feature (91)..(91): Absent or Arg
  misc_feature (92)..(92): Absent or Glu
  misc_feature (93)..(93): Absent or Arg
  misc_feature (94)..(94): Absent or Tyr
  misc_feature (95)..(95): Absent or Arg
  misc_feature (96)..(96): Absent or Asp
  misc_feature (97)..(97): Absent or Gly
  misc_feature (98)..(98): Absent or Asp
  misc_feature (99)..(99): Absent or Arg
  misc_feature (100)..(100): Absent or Asp
  misc_feature (101)..(101): Absent or Arg
  misc_feature (102)..(102): Absent or Arg
  misc_feature (103)..(103): Absent or Pro
  misc_feature (104)..(104): Absent or Ser
  misc_feature (105)..(105): Absent or Asp
  misc_feature (106)..(106): Absent or Arg
  misc_feature (107)..(107): Absent or Asp
  misc_feature (108)..(108): Absent or Arg
  misc_feature (109)..(109): Absent or Asp
  misc_feature (110)..(110): Absent or Arg
  misc_feature (111)..(111): Absent or Ala
  misc_feature (112)..(112): Absent or Pro
  misc_feature (113)..(113): Absent or Asp
  misc_feature (114)..(114): Absent or Arg
  misc_feature (115)..(115): Absent or Asp
  misc_feature (116)..(116): Absent or Thr
  misc_feature (117)..(117): Absent or Glu
  misc_feature (118)..(118): Absent or Arg
  misc_feature (119)..(119): Absent or Asn
  misc_feature (120)..(120): Absent or Arg
  misc_feature (121)..(121): Absent or Ser
  misc_feature (122)..(122): Absent or Lys
  misc_feature (123)..(123): Absent or Glu
  misc_feature (124)..(124): Absent or Asp
  misc_feature (125)..(125): Absent or Arg
  misc_feature (126)..(126): Absent or Asp
  misc_feature (127)..(127): Absent or Arg
  misc_feature (128)..(128): Absent or Lys
  misc_feature (129)..(129): Absent or Glu
  misc_feature (130)..(130): Absent or Arg
  misc_feature (131)..(131): Absent or Lys
  misc_feature (132)..(132): Absent or Pro
  misc_feature (133)..(133): Absent or Lys
  misc_feature (134)..(134): Absent or Glu
  misc_feature (135)..(135): Absent or Lys
  misc_feature (136)..(136): Absent or Lys
  misc_feature (137)..(137): Absent or Glu
  misc_feature (138)..(138): Absent or Lys
  misc_feature (139)..(139): Absent or Lys
  misc_feature (140)..(140): Absent or Pro
  misc_feature (141)..(141): Absent or Ala
  misc_feature (142)..(142): Absent or Ala
  misc_feature (143)..(143): Absent or Pro
  misc_feature (144)..(144): Absent or Ala
  misc_feature (145)..(145): Absent or Glu
  misc_feature (146)..(146): Absent or Pro
  misc_feature (147)..(147): Absent or Met
  misc_feature (148)..(148): Absent or Ile
  misc_feature (149)..(149): Absent or Val
  misc_feature (150)..(150): Absent or Val
  misc_feature (151)..(151): Absent or His
  misc_feature (152)..(152): Absent or Val
  misc_feature (153)..(153): Absent or Asn
  misc_feature (154)..(154): Absent or Asp
  misc_feature (155)..(155): Absent or Arg
  misc_feature (156)..(156): Absent or Leu
  misc_feature (157)..(157): Absent or Gly
  misc_feature (158)..(158): Absent or Thr
  misc_feature (159)..(159): Absent or Lys
  misc_feature (160)..(160): Absent or Ala
  misc_feature (161)..(161): Absent or Ala
  misc_feature (162)..(162): Absent or Ile
  misc_feature (163)..(163): Absent or Pro
  misc_feature (164)..(164): Absent or Cys
  misc_feature (165)..(165): Absent or Leu
  misc_feature (166)..(166): Absent or Ala
  misc_feature (167)..(167): Absent or Ser
  misc_feature (168)..(168): Absent or Asp
  misc_feature (169)..(169): Absent or Pro
  misc_feature (170)..(170): Absent or Ile
  misc_feature (171)..(171): Absent or Arg
  misc_feature (172)..(172): Absent or Leu
  misc_feature (173)..(173): Absent or Phe
  misc_feature (174)..(174): Absent or Lys or Met
  misc_feature (175)..(175): Absent or Ala or Gly or Met
  misc_feature (176)..(176): Absent or Gln or Leu or Ala
  misc_feature (177)..(177): Absent or Val or Ser
  misc_feature (178)..(178): Absent or Ala or Met or Ser or Leu or Pro
  misc_feature (179)..(179): Absent or Ala or Gln or Met or Leu or Ser or Gly
  misc_feature (180)..(180): Absent or Arg or Cys or Pro or Phe or Leu or Met
  misc_feature (181)..(181): Absent or Ile or Leu or Phe or Gln or Met or Ser or Thr or Pro or Ala
  misc_feature (182)..(182): Absent or Gly or Asp or Met or Ala or Pro or Phe or Ser or Leu
  misc_feature (183)..(183): Absent or Arg or Lys or Met or Ala or Ser or Phe or Pro or Cys or Leu or Ile
  misc_feature (184)..(184): Absent or Glu or Ser or Ala or Pro or Val or Phe or Met or Cys or Tyr or Leu
  misc_feature (185)..(185): Absent or Pro or Arg or Ala or Thr or Ser or Val or Trp or Tyr or Leu or Gly or His or Gln
  misc_feature (186)..(186): Absent or His or Met or Lys or Ala or Ser or Gly or Ile or Pro
  misc_feature (187)..(187): Absent or Glu or Met or Ala or Pro or Ile or Lys or Leu or Val or Thr or Ser or Arg
  misc_feature (188)..(188): Absent or Ile or Gln or Ala or Val or Ser or Met or Asn or Pro or Glu or Phe or Leu or His or Arg or Lys or Thr
  misc_feature (189)..(189): Absent or Leu or Ala or Ser or Phe or Thr or His or Gln or Ile
  misc_feature (190)..(190): Absent or Leu or Ser or Pro or Gly or Thr or Cys or Glu or Ala
  misc_feature (191)..(191): Absent or Lys or Ser or Thr or Cys or Leu or Tyr or Val or Pro or Ala
  misc_feature (192)..(192): Absent or Arg or Ser or Gly or Leu or Thr or Ala or Tyr or Asn or Val or Phe
  misc_feature (193)..(193): Absent or Gln or Cys or Ser or Ile or Leu or His or Arg or Met or Ala or Pro
  misc_feature (194)..(194): Absent or Gly or Ala or Pro or Leu or Ser or Thr or Tyr
  misc_feature (195)..(195): Absent or Glu or Ser or Phe or Leu or Thr or Ala or Gly or Ile
  misc_feature (196)..(196): Absent or Arg or Gly or Val or Leu or Ser or His or Pro or Ile or Ala
  misc_feature (197)..(197): Absent or Pro or Ser or Ala or Gly or Thr or Tyr or Arg or Phe or Leu
  misc_feature (198)..(198): Absent or Phe or Arg or Met or Ser or Pro or Cys or Thr or Ile or Gln or Ala
  misc_feature (199)..(199): Absent or Lys or Ser or Gln or Arg or Pro or Thr or Phe
  misc_feature (200)..(200): Absent or Asp or Val or Arg or His or Ser or Pro or Leu or Ala
  misc_feature (201)..(201): Absent or Gln or Pro or Lys or Leu or Gly or Ser or His or Phe or Asp or Asn
  misc_feature (202)..(202): Absent or Leu or Ala or Gly or Ser or Arg or Phe or Thr or Pro or Asn or Cys or Val
  misc_feature (203)..(203): Absent or Thr or Arg or Ile or Ser or Ala or Gly or Tyr or Pro or Asn or Phe
  misc_feature (204)..(204): Absent or Leu or Val or Thr or Pro or Ser or Ala or Gly or Arg or Ile or Asn
  misc_feature (205)..(205): Absent or Glu or Ser or Lys or Ala or Val or Thr or Ile or Tyr or Pro or Arg
  misc_feature (206)..(206): Absent or Asp or Ser or Leu or Ala or Cys or Thr or Ile or Phe or Gly or Arg
  misc_feature (207)..(207): Absent or Tyr or Arg or Pro or Ser or Leu or Thr or Ile or Gly or Asp
  misc_feature (208)..(208): Absent or Gly or Ala or Leu or Ser or Thr or Val or Phe or Pro or Ile or Tyr or Arg
  misc_feature (209)..(209): Absent or Val or Ser or Arg or Ala or Phe or Leu or Pro or Lys or Tyr or Gln or Ile
  misc_feature (210)..(210): Absent or Ser or Ala or Met or Arg or Ile or Gly or Asp or His or Phe or Glu or Thr or Leu
  misc_feature (211)..(211): Absent or Asn or Val or Thr or Arg or Ala or Phe or His or Gly or Asp or Gln or Pro or Ile or Ser
  misc_feature (212)..(212): Absent or Gly or Ser or Lys or Thr or Ala or Cys or Val or Arg or Leu or Phe or Tyr or Met or Pro or His
  misc_feature (213)..(213): Absent or Val or Lys or Gly or Asn or Asp or Pro or Leu or Ala or Tyr or Phe or Gln or Glu or Arg
  misc_feature (214)..(214): Absent or Gln or Arg or His or Ala or Pro or Ser or Leu or Phe
  misc_feature (215)..(215): Absent or Leu or Cys or Pro or Ser or Arg or Ile or Thr or Ala or Lys or His or Gly or Val
  misc_feature (216)..(216): Absent or Asp or Thr or Pro or Arg or Cys or Val or Gly or Phe or His or Ser
  misc_feature (217)..(217): Absent or Leu or Ile or Cys or Phe or Val or Ser or Ala or Arg or Gly or Lys or His or Pro
  misc_feature (218)..(218): Absent or Arg or Gln or Val or Met or Ile or Leu or Ala or Asn
  misc_feature (219)..(219): Absent or Leu or Glu or Gly or Met or Ala or Ser or Val
  misc_feature (220)..(220): Absent or Ala or Ile or Gln or Val
  misc_feature (221)..(221): Absent or Gly or Arg or Ala or Gln
  misc_feature (222)..(222): Absent or Cys or Pro or Ile or Trp
  misc_feature (223)..(223): Absent or Val or Ala or Tyr
  misc_feature (224)..(224): Absent or Leu or Ser or Pro or Asp
  misc_feature (225)..(225): Absent or Ser or Thr or Leu or Asp
  misc_feature (226)..(226): Absent or Val or Pro or Gln
  misc_feature (227)..(227): Absent or Ser or Ala or Lys or Tyr
  misc_feature (228)..(228): Absent or Ser or Ala or Met
  misc_feature (229)..(229): Absent or Val or Ala or Met
  misc_feature (230)..(230): Absent or Gln or Ser or Thr or Ile
  misc_feature (231)..(231): Absent or Met or Thr or Ser or Asp
  misc_feature (232)..(232): Absent or Thr or Pro or Lys or Arg
  misc_feature (233)..(233): Absent or Val or Ala or Phe
  misc_feature (234)..(234): Absent or Met or Leu or Pro or Ile or Val
  misc_feature (235)..(235): Absent or Thr or Asn or Leu or Ser or Asp or Val or Cys
  misc_feature (236)..(236): Absent or Met or Gly or Ala or Ser or Leu or Cys or Val or Pro or Arg or Phe
  misc_feature (237)..(237): Absent or Ala or Arg or Val or Ile or Gly or Pro or Ser or Leu or Cys or Phe
  misc_feature (238)..(238): Absent or Gly or Leu or Ala or Asn or Ser or Arg or Glu or Tyr or His or Phe or Val or Met
  misc_feature (239)..(239): Absent or Val or Asn or Ser or Glu or Cys or Gln or Thr or Gly or Phe or Ala or Leu or Tyr or Arg or Lys
  misc_feature (240)..(240): Absent or Arg or Lys or Met or Pro or Ile or Gln or Val or Thr or His or Ala or Cys
  misc_feature (241)..(241): Absent or Phe or Leu or Lys or Asp or Val or Arg or Cys or Glu or Gln or Asn
  misc_feature (242)..(242): Absent or Leu or Arg or Thr or Ala or Gly or Val or Cys or His or Ser or Pro or Lys
  misc_feature (243)..(243): Absent or Arg or His or Glu or Ala or Gly or Val or Thr or Ser or X or Asp or Lys or Leu or Asn or Ile
  misc_feature (244)..(244): Absent or Phe or Ala or Trp or Val or Glu or Met or Arg or Ile or Leu or Lys or Thr or Asp
  misc_feature (245)..(245): Absent or Asp or Lys or Thr or Val or Leu or Glu or Gln or Ala or Ser or Ile or Asn or Met or Phe or Gly or Pro
  misc_feature (246)..(246): Absent or Asp or Ser or Glu or Pro or Gln or Leu or His or Gly or Ala or Lys or Val or Tyr
  misc_feature (247)..(247): Absent or His or Lys or Thr or Ser or Pro or Glu or Leu or Arg or Ile or Ala or Asn or Gln
  misc_feature (248)..(248): Absent or Tyr or Lys or Val or Ala or Ile or Leu or Glu or Arg or Ser or Gly or Phe
  misc_feature (249)..(249): Absent or Ile or Asp or Thr or Val or Ala or Glu or Gly or Asn or Lys or Ser or Arg
  misc_feature (250)..(250): Absent or Leu or Phe or Pro or Gln or Met or Lys or Val or His or Ile or Trp or Asn or Ser or Ala or Gly
  misc_feature (251)..(251): Absent or Val or Pro or Thr or Ile or Glu or Met or Asn or Gly or Ala
  misc_feature (252)..(252): Absent or Cys or Leu or Thr or Gln or Arg or Lys or Ala or Gly or Asn or Pro
  misc_feature (253)..(253): Absent or Arg or Phe or Thr or Asn or Gly or Ser or Lys or Trp or Cys
  misc_feature (254)..(254): Absent or Thr or His or Ser or Ala or Lys or Arg or Pro or Val or Asn or Ile or Asp
  misc_feature (255)..(255): Absent or His or Leu or Thr or Ser or Val or Met or Arg or Pro or Ala or Asp or Gly
  misc_feature (256)..(256): Absent or Val or Lys or Glu or Ser or Met or Pro or Gly or Ile or Cys or Thr or Phe or Tyr or Leu or Arg
  misc_feature (257)..(257): Absent or Leu or Cys or Met or Ala or Lys or Asn or Arg or Val or Gly or Ile or Pro or Ser or Tyr or His
  misc_feature (258)..(258): Absent or Leu or Ser or Gln or Glu or Arg or Ala or Thr or Asp or Pro or His or Val or Ile
  misc_feature (259)..(259): Absent or Leu or Met or Glu or Val or Lys or Pro or Asn or His or Gly or Ala or Thr or Ile
  misc_feature (260)..(260): Absent or Gln or Met or Asn or Lys or Ala or Gly or Pro or Ile or Arg or Ser or Glu or Leu or Tyr or Phe or His or Val or Thr
  misc_feature (261)..(261): Absent or Leu or Val or Met or Arg or Thr or Gly or Trp or Ala or Pro or Asn or Gln or Asp or Glu or Ser
  misc_feature (262)..(262): Absent or Phe or Ile or Thr or Ala or Gly or Glu or Leu or Ser or Asp or Arg or Tyr or Val or Gln or Asn
  misc_feature (263)..(263): Absent or Lys or Asp or Trp or Ser or Ile or Thr or Val or Ala or Pro or Met or Arg or Gly or Asn or Gln
  misc_feature (264)..(264): Absent or Asn or Leu or Gln or Ser or Val or Pro or Met or Ala or Trp or Thr or Gly or Phe
  misc_feature (265)..(265): Absent or Gly or Glu or Leu or Asn or Lys or Thr or Asp or Ala or Val or Ser or Ile or Pro or Tyr or Phe or His
  misc_feature (266)..(266): Absent or Tyr or His or Ser or Pro or Trp or Ala or Gly or Phe or Met or Val or Arg or Ile or Thr or Asn or Leu
  misc_feature (267)..(267): Absent or His or Val or Cys or Asp or Lys or Gln or Gly or Ser or Pro or Ala or Glu or Thr or Ile or Leu or Asn or Met or Phe
  misc_feature (268)..(268): Absent or Gly or Val or Ala or Gln or Ser or Glu or Leu or Met or Asn or Asp or Pro or Thr or Trp or Phe or Arg or Ile or Tyr
  misc_feature (269)..(269): Absent or Leu or Asp or Pro or Gly or Thr or Arg or His or Met or Gln or Phe or Ala or Ser or Ile or Val
  misc_feature (270)..(270): Absent or Leu or Tyr or His or Pro or Trp or Arg or Lys or Asn or Met or Ile or Phe or Glu or Gly or Thr or Ser or Asp
  misc_feature (271)..(271): Absent or Ala or Ile or Pro or Val or Arg or Gly or Ser or Met or Leu or Cys or Asn or Thr or Lys
  misc_feature (272)..(272): Absent or Ala or Met or Arg or Asn or Lys or Pro or Ser or Phe or Gln or Leu or Val or Thr or Asp or Tyr
  misc_feature (273)..(273): Absent or Leu or His or Gly or Thr or Pro or Arg or Asn or Val or Met or Asp or Tyr or Ala or Glu or Gln or Lys or Ser or Ile
  misc_feature (274)..(274): Absent or Gln or Ile or Ala or Pro or Arg or Ser or Gly or Leu or Asn or Phe or Lys or Thr or Asp or Met or Glu or Val or His
  misc_feature (275)..(275): Absent or Leu or Asp or Asn or Ser or Lys or Ala or Pro or Thr or Ile or Gln or Phe or Val or Met or Glu or Arg or Gly
  misc_feature (276)..(276): Absent or Pro or Ser or Asn or Thr or Met or Ala or Asp or Arg or Leu or Phe or Gly or Lys or Gln or Glu or Val or Ile
  misc_feature (277)..(277): Absent or Arg or Gln or Thr or Leu or Ser or Pro or Lys or Gly or Met or Ala or Asn or Glu or Val or Asp
  misc_feature (278)..(278): Absent or Pro or Leu or Arg or Glu or Met or Ile or Ser or Lys or Thr or Gln or Ala or Asp or Val or Gly or Asn
  misc_feature (279)..(279): Absent or Phe or Gln or Gly or Glu or Asn or Pro or Ser or Met or Arg or Thr or Ala or Val or His or Leu or Asp or Lys or Ile
  misc_feature (280)..(280): Absent or Ala or Leu or Val or Met or Phe or Gln or Asp or Thr or Arg or Lys or Ile or Gly or Glu or Asn or Ser or Tyr or Pro or His
  misc_feature (281)..(281): Absent or Ile or His or Lys or Arg or Ser or Met or Ala or Asp or Pro or Thr or Glu or Val or Asn or Gly or Gln
  misc_feature (282)..(282): Absent or Ile or Met or Lys or Val or Gln or Asp or Thr or Leu or Pro or Arg or Asn or Ala or Tyr or Glu or Ser
  misc_feature (283)..(283): Absent or Pro or Leu or Ala or Asn or Arg or Met or Val or Ser or Thr or Gly or Phe or Ile or Glu or Gln or Lys
  misc_feature (284)..(284): Absent or Asp or Thr or Ser or Gly or Ala or His or Leu or Lys or Pro or Met or Phe or Gln or Asn or Glu or Ile or Tyr or Val or Arg
  misc_feature (285)..(285): Absent or Val or Gly or Pro or Asp or Tyr or Ala or Ser or Ile or Asn or Glu or Phe or Arg or Lys or Met or Leu or Thr or Gln or His
  misc_feature (286)..(286): Absent or Ile or Ser or Ala or Met or Leu or Gln or Thr or Tyr or Trp or Cys or Lys or Glu or Asn or Pro or His or Gly or Val or Phe or Asp or Arg
  misc_feature (287)..(287): Absent or Glu or Gly or Lys or Asp or Ser or Asn or Thr or Val or Gln or Ile or Tyr or Arg or Met or His or Ala or Phe or Pro or Leu or Cys or Trp
  misc_feature (288)..(288): Absent or Asp or Ile or Met or Arg or Phe or Gln or Ala or Thr or Glu or Gly or Tyr or Val or Ser or Asn or His or Pro or Leu or Lys
  misc_feature (289)..(289): Absent or Met or Lys or Asn or Pro or Cys or Ala or Gly or Thr or Glu or Ser or Tyr or Asp or Ile or Arg or Gln or His or Leu
  misc_feature (290)..(290): Absent or Thr or Ile or Met or Ser or Leu or Glu or His or Lys or Ala or Pro or Asn or Gly or Gln or Arg or Tyr or Asp or Val or Cys
  misc_feature (291)..(291): Absent or Arg or Met or Phe or Glu or Leu or Tyr or Gln or Asn or Asp or Gly or Trp or Ser or Val or Lys or Ile or Ala or Pro
  misc_feature (292)..(292): Absent or Pro or Ala or Thr or Ser or Ile or Lys or Asp or Glu or Arg or Asn or Met or Cys or Leu or Tyr or Val
  misc_feature (293)..(293): Absent or Ser or Ala or Met or Arg or Leu or Lys or Asn or His or Gly or Glu or Ile or Pro or Asp or Thr
  misc_feature (294)..(294): Absent or Ala or Met or Thr or His or Lys or Glu or Leu or Asn or Arg or Ser or Gly or Val
  misc_feature (295)..(295): Absent or Gly or Met or His or Tyr or Ala or Glu or Thr or Arg or Asp or Ser or Leu or Cys or Ile or Asn
  misc_feature (296)..(296): Absent or Met or Leu or Pro or Gln or His or Gly or Tyr or Arg or Ala or Ser or Thr or Asn or Lys or Asp or Val or Ile
  misc_feature (297)..(297): Absent or Ser or Met or Gly or Ile or Asn or Arg or Thr or Ala or Pro or His or Glu or Lys or Asp or Gln
  misc_feature (298)..(298): Met or Absent or Ile or Val or Gly or Pro or Thr or Gln or Ser or Ala or Phe or Lys or Asp or Asn or Arg or Glu
  misc_feature (299)..(299): Lys or Arg or Absent or Asn or Ser or Leu or Ile or Gly or Thr or Asp or Pro or Glu or Met or Tyr or Val or His
  misc_feature (300)..(300): Ser or Arg or Lys or Gly or Absent or Asn or Asp or Pro or Ala or Glu or Ile or Met or His or Gln
  misc_feature (301)..(301): Ala or Ser or Cys or Val or Absent or Thr or Ile or Leu or Arg or Asn or Met or Pro or Tyr or Lys or Phe or His
  misc_feature (302)..(302): Thr or Lys or Gln or Absent or Leu or Ile or Val or Phe or Arg or Gly or Ala or Ser or Cys or Met or His or Asn or Tyr
  misc_feature (303)..(303): Ile or Val or Absent or Leu or Glu or Phe or Met
  misc_feature (305)..(305): Gly or Ile or Val or Met or Ser or Absent or Ala or Thr or Asp or His or Pro or Cys or Asn or Phe
  misc_feature (307)..(307): Gly or Asn or Ser or Thr or Absent or Asp or Glu or Ala or Pro or Arg or Ile or Lys or Gln or His or Leu
  misc_feature (308)..(308): Ser or Absent or Ala or Ile or Val or Asp or Gly or Glu or Thr or Lys or His or Gln or Asn or Phe
  misc_feature (309)..(309): His or Absent or Cys or Thr or Asn or Gln or Gly or Ser or Ala or Tyr or Phe or Ile or Val or Glu
  misc_feature (310)..(310): Pro or Thr or Absent or Met or Leu or Ser or Gln or Arg or Trp or Glu or Val or Lys or Asn or Ile or Gly or His or Tyr or Asp or Ala or Cys
  misc_feature (311)..(311): Glu or Leu or Ala or Absent or Val or Ser or Asp or Lys or Asn or Gln or His or Gly or Pro or Ile or Arg or Thr or Tyr or Phe
  misc_feature (314)..(314): His or Gly or Gln or Lys or Asn or Glu or Absent or Ala or Thr or Arg or Asp or Pro or Ser or Leu or Cys or Val or Tyr or Met
  misc_feature (315)..(315): Leu or Met or Thr or Ala or Absent or Gln or Cys or Lys or Arg or Ser or Asn or Glu or Asp or Gly or Phe
  misc_feature (316)..(316): Ile or Val or Absent or Ser or Leu or Ala or Thr or Met
  misc_feature (317)..(317): Ser or Cys or Absent or Thr or Ala or Gln or Glu or Ile or Met or Gly or Val
  misc_feature (318)..(318): Asn or Asp or Gln or Glu or Absent or Ala or Arg or His or Gly or Lys or Val or Ser or Thr or Phe or Cys or Tyr or Trp
  misc_feature (319)..(319): Arg or Lys or Absent or Asn or Ala or His or Ser or Tyr or Ile or Gln or Thr or Glu or Leu or Cys or Val or Asp or Met or Gly or Phe or Trp
  misc_feature (321)..(321): Gly or Absent or Arg or Ser or Asp or Cys or Ala or Thr or Asn or Lys or Glu or His or Gln or Tyr or Phe
  misc_feature (322)..(322): Absent or Phe or His or Arg or Lys or Thr or Ile or Ser or Val or Gln or Glu or Ala or Leu or Met or Cys or Gly
  misc_feature (323)..(323): Absent or Val or Ile or Glu or Leu or Pro or Ala or Lys or Ser or Gly or Thr or Gln or Asp or Asn or His or Arg or Tyr
  misc_feature (324)..(324): Absent or Phe or Tyr or Cys or Leu or Pro or Ile or Arg
  misc_feature (325)..(325): Absent or Ser or Ala or Glu or Ile or Leu or Asp or Cys or Val or Gly
  misc_feature (326)..(326): Absent or Ile or Arg or Asn or Asp or Ala or Glu or Pro or Leu or Lys or Met or Val
  misc_feature (327)..(327): Absent or Gly or Lys or Val or Ile or Thr or Ser or His or Cys
  misc_feature (328)..(328): Absent or Leu or Phe or Glu or His or Thr
  misc_feature (329)..(329): Absent or Tyr or His or Asn or Ser or Glu or Phe or Thr or Arg or Ile
  misc_feature (330)..(330): Absent or Gln or Asp or Glu or Lys or Arg or Asn
  misc_feature (331)..(331): Absent or Gln or Arg or Ile or Val
  misc_feature (332)..(332): Absent or Ser or Met or Val or Ile
  misc_feature (333)..(333): Absent or Glu or Asp
  misc_feature (334)..(334): Absent or Lys or Arg or Ser
  misc_feature (335)..(335): Absent or Leu or Ile
  misc_feature (336)..(336): Absent or Ala or Thr or Cys or Ser
  misc_feature (337)..(337): Absent or Lys or Asp or Gln
  misc_feature (338)..(338): Absent or Arg or Asp or Thr
  misc_feature (339)..(339): Absent or Tyr or Ser
  misc_feature (340)..(340): Absent or Asn or Gly or Lys or His or Ser
  misc_feature (341)..(341): Absent or Thr or Leu or Ala or Cys
  misc_feature (342)..(342): Absent or Ser or Asp or Leu or Phe
  misc_feature (343)..(343): Absent or Ser or Lys
  misc_feature (344)..(344): Absent or Glu or Gly
  misc_feature (345)..(345): Absent or Asp or Ser or Glu
  misc_feature (346)..(346): Absent or Met or Val or Ile
  misc_feature (347)..(347): Absent or Ile or Phe or Leu
  misc_feature (348)..(348): Absent or Gln or Arg or Lys
  misc_feature (349)..(349): Absent or Lys or Asp or Ile or Leu
  misc_feature (350)..(350): Absent or Phe or Ala or Glu
  misc_feature (351)..(351): Absent or Asn or Lys or Gly or Glu
  misc_feature (352)..(352): Absent or Phe or Val or Ile
  misc_feature (353)..(353): Absent or Tyr or Leu
  misc_feature (354)..(354): Absent or Ser or Arg
  misc_feature (355)..(355): Absent or Asp or Pro
  misc_feature (356)..(356): Absent or Leu or Phe
  misc_feature (357)..(357): Absent or Phe or Leu
  misc_feature (358)..(358): Absent or Ala or Ser or Glu
  misc_feature (359)..(359): Absent or Gly or Thr
  misc_feature (360)..(360): Absent or Arg or Glu
  misc_feature (361)..(361): Absent or Met or Leu
  misc_feature (362)..(362): Absent or Ser or Cys
  misc_feature (363)..(363): Absent or Val or Ala or Leu or Phe
  misc_feature (364)..(364): Absent or Asn or His or Ser or Gly or Glu
  misc_feature (365)..(365): Absent or Lys or Asp or Leu or Phe
  misc_feature (366)..(366): Absent or Asp or Ser
  misc_feature (367)..(367): Absent or Thr or Val or Asn
  misc_feature (368)..(368): Absent or Asn or Arg or Phe or Leu or Ser
  misc_feature (369)..(369): Absent or Lys or Arg
  misc_feature (370)..(370): Absent or Ile or Phe or Ser
  misc_feature (371)..(371): Absent or His or Asn or Lys or Asp
  misc_feature (372)..(372): Absent or Val or Pro or Glu
  misc_feature (373)..(373): Absent or Pro or Ala or Ser or Asn or Gln or Asp
  misc_feature (374)..(374): Ile or Val or Thr or Absent or Met or Pro or Leu or Gln or Glu or Lys or His
  misc_feature (375)..(375): Thr or Glu or Ser or Val or Absent or His or Arg or Asp or Pro or Gly or Gln or Lys or Ala or Phe or Leu or Met
  misc_feature (376)..(376): Pro or Ala or Absent or Arg or Ile or Gln or Leu or Val or Lys or Glu or Thr or Met or Phe or Ser or Asp or Asn or Cys
  misc_feature (377)..(377): Cys or Ala or Absent or Gly or Ser or Thr or Val or Ile or Leu or Asn or Phe or Gln or Lys or His or Arg
  misc_feature (378)..(378): Asp or Pro or Lys or Absent or Ser or Ala or Glu or Gln or Arg or Asn or Leu or Phe or His or Thr or Ile or Gly or Val or Tyr or Met
  misc_feature (379)..(379): Val or Cys or Absent or Ala or Gly or Arg or Ile or Ser or Thr or Met or Gln or Pro or Phe or Leu or Asn or Lys
  misc_feature (380)..(380): Ser or Thr or Glu or Absent or Met or Lys or Asp or Val or Ile or Leu or His or Asn or Gly or Ala or Arg or Gln or Cys or Tyr or Trp
  misc_feature (381)..(381): Leu or Absent or Ser or Cys or Val or Ile or Ala or Phe or Gln or Thr or Lys or Arg or His
  misc_feature (382)..(382): Lys or Gly or Arg or Absent or Thr or Ser or Ala or Glu or Phe or Tyr or Val or Leu or Ile or Asn or Asp or Gln or His or Met
  misc_feature (383)..(383): Arg or Lys or Absent or Gln or Asn or His or Tyr or Cys or Thr or Glu or Ala or Val or Ile or Asp or Ser
  misc_feature (385)..(385): Ala or Ser or Absent or Lys or Glu or Arg or Pro or Thr or Cys or Met or Leu or Gln or Asn or Val
  misc_feature (389)..(389): Thr or Absent or Ala or Asn or Ile or Ser or Val or Phe or Leu or His or Met or Arg or Gln or Lys or Glu
  misc_feature (390)..(390): Ser or Asn or Cys or Absent or Pro or Leu or Arg or Asp or Ile or Thr or Lys or Ala or Gln or Glu or His or Tyr or Gly or Phe or Met or Val or Trp
  misc_feature (391)..(391): Val or Absent or Ala or Pro or Ile or Cys or Phe or Thr or Leu or Glu or Met
  misc_feature (392)..(392): Glu or Gln or Asn or Absent or Arg or Ser or Ala or Thr or Lys or Met or Leu or Tyr or His or Val or Asp
  misc_feature (393)..(393): Ile or Val or Absent or Leu or Asp or Pro or Tyr or Phe or Ala or Ser or Met
  misc_feature (394)..(394): Arg or Gly or Absent or Leu or Asp or Glu or Lys or Gln or Tyr or His or Thr or Ala or Val or Asn or Pro or Ser or Met or Ile or Phe
  misc_feature (396)..(396): Absent or Gly
  misc_feature (397)..(397): Absent or Glu or Asn or Ile or Val or Ala
  misc_feature (398)..(398): Absent or Glu or Lys or Val or Ile or Thr or Ala or Pro or Gln or Ser or Asp
  misc_feature (399)..(399): Ser or Absent or Gly or Thr or Cys or Asn or Gln or Glu or Asp or His or Pro or Ala or Val
  misc_feature (400)..(400): Val or Ile or Absent or Arg or Leu or Thr or Gly or Ala or Asp or Asn or Cys or Ser
  misc_feature (403)..(403): Lys or Glu or Gln or Absent or Ser or Pro or Cys or His or Asp or Arg or Thr or Asn or Ala or Gly or Met or Tyr or Val or Ile
  misc_feature (406)..(406): Phe or Tyr or Absent or His or Ile or Val or Leu
  misc_feature (407)..(407): Ile or Val or Absent or Ser or Tyr or Leu or Thr or Phe or Gln
  misc_feature (408)..(408): Leu or Val or Ile or Absent or Pro or Phe or Gln or His or Met or Glu
  misc_feature (410)..(410): Ser or Absent or Ala or Asn or Thr or Asp or Met or Gln or Pro or Cys or Gly
  misc_feature (411)..(411): Gly or Absent or Ser or Arg or Phe or Pro or Gln or Thr or Val or Leu or Ile or His or Cys or Ala or Met
  misc_feature (412)..(412): Ser or Absent or Thr or Gly or Asn or Cys or Ala or Ile or Tyr or Val or Glu or His or Pro or Asp or Gln
  misc_feature (413)..(413): Ser or Pro or Glu or Absent or Asp or Val or Asn or Gly or Arg or Met or Ala or Tyr or Leu or His or Lys or Gln or Thr or Phe or Trp or Cys
  misc_feature (415)..(415): Absent or Thr or Tyr or Pro or Gln or Asp or Val or Ala or Lys or Asn or Ser or Gly or Glu or Ile
  misc_feature (416)..(416): Absent or Asn or Thr or Glu or Pro or His
  misc_feature (417)..(417): Absent or Arg or Pro or Ile or Val or Gly
  misc_feature (418)..(418): Absent or Asn or Thr or Leu or Glu or Ser
  misc_feature (419)..(419): Absent or Ala or Ile or Val
  misc_feature (420)..(420): Absent or Ala or Asn
  misc_feature (421)..(421): Absent or Asn or Glu or Ser
  misc_feature (422)..(422): Absent or Ser or Gly or Asn
  misc_feature (423)..(423): Absent or Asn or Lys or Glu
  misc_feature (424)..(424): Absent or Asn or Ser
  misc_feature (425)..(425): Absent or Asn
  misc_feature (426)..(426): Absent or Asn
  misc_feature (427)..(427): Absent or Asn
  misc_feature (428)..(428): Absent or Asn
  misc_feature (429)..(429): Absent or Asn
  misc_feature (430)..(430): Absent or Asp
  misc_feature (431)..(431): Absent or Gly
  misc_feature (432)..(432): Absent or Ser
  misc_feature (433)..(433): Absent or Ser
  misc_feature (434)..(434): Absent or Thr
  misc_feature (435)..(435): Absent or Ser
  misc_feature (436)..(436): Absent or Ala
  misc_feature (437)..(437): Absent or Thr
  misc_feature (438)..(438): Absent or Ala
  misc_feature (439)..(439): Absent or Glu
  misc_feature (440)..(440): Absent or Ser or Pro or Thr or Gly or Lys
  misc_feature (441)..(441): Absent or Gly or Ala or Glu or Lys or Ile or Val
  misc_feature (442)..(442): Absent or Cys or Ser or His or Gly or Ala or Val or Ile or Thr or Lys
  misc_feature (443)..(443): Absent or Gly or Val or Thr or Ala or Glu or Gln or His or Asn or Phe or Met or Trp or Ser
  misc_feature (444)..(444): Absent or His or Gln or Thr or Asn or Lys or Asp or Ser or Ala or Glu or Val or Gly or Pro
  misc_feature (445)..(445): Val or Ile or Absent or Ser or Pro or Ala or Gln or Thr or His or Leu or Gly
  misc_feature (447)..(447): Asp or Absent or Thr or Glu or Ser or Lys or Phe or His or Gln or Arg or Asn or Ala or Tyr or Val or Leu
  misc_feature (448)..(448): Ser or His or Asp or Absent or Asn or Thr or Tyr or Phe or Arg or Gly or Lys or Ala or Trp or Cys or Leu
  misc_feature (454)..(454): Ile or Absent or Met or Val or Thr or Phe or Leu or Gln or Ala
  misc_feature (456)..(456): Ile or Val or Absent or Leu or Thr or Ala or Gly or Met or Cys or Asn or Ser or Arg
  misc_feature (459)..(459): Cys or Arg or Absent or Ser or Val or Leu or Ala or Ile or Met or Thr or Phe or Gly or Asp
  misc_feature (460)..(460): Lys or Arg or Ser or Absent or Gln or Met or Trp or Tyr or Ala or Asn or His or Val
  misc_feature (465)..(465): Lys or His or Asn or Ser or Arg or Thr or Absent or Tyr or Gly or Glu or Ala or Asp or Val or Pro or Gln
  misc_feature (466)..(466): Arg or Lys or Ser or Gly or Asn or Absent or Tyr or Glu or Thr or Gln or Asp
  misc_feature (467)..(467): Absent or Leu
  misc_feature (468)..(468): Absent or Asn or Ser or Arg or His or Lys or Asp or Glu or Ala or Thr or Tyr or Val or Gln
  misc_feature (471)..(471): Ala or Absent or Thr or Ser or Val or Cys or Leu or Ile or Pro
  misc_feature (473)..(473): Met or Ile or Absent or Leu or Ala or Val or Thr or Ser or Cys
  misc_feature (476)..(476): Phe or Tyr or Absent or Leu or Arg or Met or Cys or Val
  misc_feature (484)..(484): Met or Absent or Lys or Glu or Pro or Ile or Gln or Val or Leu or Trp or Arg or Thr or Gly
  misc_feature (485)..(485): Arg or Lys or Absent or Asn or Pro or Asp or Thr or Ser or Ala or Phe or Tyr or His or Gly or Met or Val or Ile or Leu or X
  misc_feature (486)..(486): Lys or Arg or Absent or Ser or Tyr or Phe or His or Gly or Ala or Gln or Glu or Met
  misc_feature (487)..(487): Tyr or His or Absent or Val or Thr or Ser or Leu or Ala or Asn or Lys or Met or Gln or Pro or Arg or Gly or Phe
  misc_feature (488)..(488): Arg or Absent or Asp or Ala or Val or Phe or Lys or Ser or Glu or Gly or Asn or Met
  misc_feature (489)..(489): Asp or Gly or Absent or Phe or Lys or Ser or Ala or Asn or Thr or Arg or Leu
  misc_feature (490)..(490): Ala or Absent or Gln or Gly or Ile or Leu or Pro or Asp or Asn or Ser
  misc_feature (491)..(491): Absent or Ala or Val or Thr or Glu or Ser or Asn or Gln
  misc_feature (492)..(492): Absent or Pro or Gly or Ser or Ile or Glu or Tyr or Leu
  misc_feature (493)..(493): Absent or Leu or Ile or Pro or Ala or Asn
  misc_feature (494)..(494): Absent or Ile or Ser or Gly or Pro or Val or Lys
  misc_feature (495)..(495): Absent or Ser or Gly or Gln or Lys
  misc_feature (496)..(496): Absent or Lys or Asn or Ile or Val or Arg or Ala or Ser or Asp
  misc_feature (497)..(497): Absent or Asn
  misc_feature (498)..(498): Absent or His
  misc_feature (499)..(499): Absent or Asp
  misc_feature (500)..(500): Absent or Ala
  misc_feature (501)..(501): Absent or Val
  misc_feature (502)..(502): Absent or Thr
  misc_feature (503)..(503): Absent or Met
  misc_feature (504)..(504): Absent or Thr or Ser or Ala or Pro or Lys
  misc_feature (505)..(505): Absent or Val or Gly or Thr or Leu
  misc_feature (506)..(506): Absent or Thr or Ala or Ser or Asn or Glu
  misc_feature (507)..(507): Absent or Glu or Ser or Arg or Gly
  misc_feature (508)..(508): Absent or Gly or Asn or Lys or Asp
  misc_feature (509)..(509): Absent or Gln or Asp or Gly or Cys
  misc_feature (510)..(510): Absent or Ala or Pro or Thr or Ser or Gly
  misc_feature (511)..(511): Absent or Arg or Lys or Gly or Thr or Ser or Ala
  misc_feature (512)..(512): Absent or Lys or Glu or Gly or Val or Pro or Asn
  misc_feature (513)..(513): Absent or Ala or Lys or Asn or Ser or Asp or Glu or Gly
  misc_feature (514)..(514): Absent or Gly or Tyr or Asn or Asp or Glu
  misc_feature (515)..(515): Absent or Thr or Pro or Ser
  misc_feature (516)..(516): Absent or Phe or Thr or Asp or Glu or Lys
  misc_feature (517)..(517): Absent or Glu or Asp or Ser or Tyr
  misc_feature (518)..(518): Absent or Glu or Ser or Thr
  misc_feature (519)..(519): Absent or Lys or His or Arg or Thr or Phe or Val
  misc_feature (520)..(520): Absent or Gly or Pro or Asp or Glu
  misc_feature (521)..(521): Absent or Ala or Gly or Leu or Ser or Pro or Thr
  misc_feature (522)..(522): Absent or Glu or Thr or Gln or Ala
  misc_feature (523)..(523): Absent or Ala or Pro or Asp or Asn
  misc_feature (524)..(524): Absent or Val or Ile or Gly or Ala or Arg or His
  misc_feature (525)..(525): Absent or Glu or Pro or Ser or Val or Thr or Ala
  misc_feature (526)..(526): Absent or Ser or Gln or Phe or Val or Gly or Pro or His or Ala
  misc_feature (527)..(527): Absent or Val or Ser or Lys or Pro or Asn or Arg or Ile or Gly
  misc_feature (528)..(528): Absent or Leu or Met or Pro or Ala
  misc_feature (529)..(529): Absent or Thr or Leu or Met or Arg or Lys or Asp or Glu
  misc_feature (530)..(530): Absent or Thr or Gln or Ser or Val
  misc_feature (531)..(531): Absent or Gln or Val or Ser or Lys or Arg or Ala or Leu or Gly
  misc_feature (532)..(532): Absent or Lys or Glu or Arg or Gly or Ser or Asn
  misc_feature (533)..(533): Absent or Pro or Lys or Ser or Glu or Leu
  misc_feature (534)..(534): Absent or Val or Pro or Gly or Ser or Ala or Thr or Ile
  misc_feature (535)..(535): Absent or Ser or Met or Ala or Glu or Asn
  misc_feature (536)..(536): Absent or Gln or Ser or Glu or Lys or Ala or Gly
  misc_feature (537)..(537): Absent or Ser or Pro or Glu or Met or Val
  misc_feature (538)..(538): Absent or Ala or Asn or Ser or Pro or Gly or Asp
  misc_feature (539)..(539): Absent or Arg or Ser or Leu or Phe or Pro or Asn
  misc_feature (540)..(540): Absent or Lys or Ser or Val or Leu
  misc_feature (541)..(541): Absent or Ser or Arg or Ala or Thr or Ile
  misc_feature (542)..(542): Absent or Ile or Leu or Pro or Asn or Glu or Thr or Asp
  misc_feature (543)..(543): Absent or Glu or Asp or Phe or Thr or Gly or Lys or His or Asn
  misc_feature (544)..(544): Absent or Leu or Ala or Ser or Thr or Pro or Met
  misc_feature (545)..(545): Absent or Ala or Ser or Leu or Gln
  misc_feature (546)..(546): Absent or Ile or Ser or Gly or Lys or Arg
  misc_feature (547)..(547): Absent or Glu or Ser or Arg or Ala or Thr or Asp or Gly
  misc_feature (548)..(548): Absent or Asn or Ala or Ser or Leu
  misc_feature (549)..(549): Absent or Ser or Thr or Ile or Glu or Ala
  misc_feature (550)..(550): Absent or Ile or Ser or Thr or Val or Phe or Lys
  misc_feature (551)..(551): Absent or Ser or Asn or His or Ile or Gln or Arg or Ala or Thr
  misc_feature (552)..(552): Absent or Gly or Val or Gln or Asn
  misc_feature (553)..(553): Absent or Thr or Pro or Ser or Gly or Leu
  misc_feature (554)..(554): Absent or Leu or Gln or Glu or Asp or Val or Asn
  misc_feature (555)..(555): Absent or Gln or Ser or Asn or Thr or Ile or Ala or Asp or Glu
  misc_feature (556)..(556): Absent or Leu or Met or Lys or Arg or Gly or Pro or Ser
  misc_feature (557)..(557): Absent or Gly or Gln or Glu or Ala or Leu or Asp or Thr or Ser
  misc_feature (558)..(558): Absent or Glu or Ser or Asn or Ala or Met or Gly
  misc_feature (559)..(559): Absent or Ser or Pro or Thr or Lys or Ala or Gly
  misc_feature (560)..(560): Absent or Ala or Thr or Gln or Lys or His or Arg or Gly or Pro
  misc_feature (561)..(561): Absent or Pro or Gly or Thr or Val or Asn
  misc_feature (562)..(562): Absent or Val or Leu or Ile or Met or Thr or Ala or Lys
  misc_feature (563)..(563): Absent or Arg or Asn or Val or Pro or Ser or Lys
  misc_feature (564)..(564): Absent or Ala or Pro or Thr or Lys or Asn or Arg
  misc_feature (565)..(565): Absent or Lys or Val or Pro or Ile or Gly or Arg or Gln or Leu
  misc_feature (566)..(566): Absent or Leu or Glu or Asn or Ser or Lys or Pro or Ala
  misc_feature (567)..(567): Absent or Glu or Leu or Ser or Ala or Gln or Asp or Asn
  misc_feature (568)..(568): Absent or His or Arg or Ser or Pro or Thr or Gln or Gly
  misc_feature (569)..(569): Absent or Ser or Pro or Ala or Val or Asp or Ile or Phe or Leu
  misc_feature (570)..(570): Absent or Gly or Thr or Pro or Ala or Ser
  misc_feature (571)..(571): Absent or Ser or Ala or Pro or Asn or Thr or Gly or His or Arg
  misc_feature (572)..(572): Absent or Asn or Ser or Thr or Lys or Tyr
  misc_feature (573)..(573): Absent or Asn or Lys or Thr or Val or Asp
  misc_feature (574)..(574): Absent or Asn or Ser or Asp or Thr
  misc_feature (575)..(575): Absent or Phe or Leu or Glu or Ala or Gly or Met
  misc_feature (576)..(576): Absent or Asp or Gly or Asn or Val or Glu
  misc_feature (577)..(577): Absent or Ile or Glu or Gly or Pro or Ser
  misc_feature (578)..(578): Absent or Lys or Val or Leu
  misc_feature (579)..(579): Absent or Lys or Asn or Arg
  misc_feature (580)..(580): Absent or Gly or Ser
  misc_feature (581)..(581): Absent or Ser or Asp
  misc_feature (582)..(582): Absent or Arg or Thr or Ser
  misc_feature (583)..(583): Absent or Ser or Met
  misc_feature (584)..(584): Absent or Gly or Asp or Lys
  misc_feature (585)..(585): Absent or Lys or Ser
  misc_feature (586)..(586): Absent or Pro or Ile or Thr
  misc_feature (587)..(587): Absent or Arg or Lys
  misc_feature (588)..(588): Absent or Gly or Ala or Tyr
  misc_feature (589)..(589): Absent or His or Glu
  misc_feature (590)..(590): Absent or His or Asn or Ala
  misc_feature (591)..(591): Absent or Pro or Ser or Ala
  misc_feature (592)..(592): Absent or Thr
  misc_feature (593)..(593): Absent or Lys
  misc_feature (594)..(594): Absent or Gly
  misc_feature (595)..(595): Absent or Asp
  misc_feature (596)..(596): Absent or Arg
  misc_feature (597)..(597): Absent or Asn
  misc_feature (598)..(598): Absent or Ala
  misc_feature (599)..(599): Absent or Thr or Gln or Arg or Ala
  misc_feature (600)..(600): Absent or Ser or Leu or Met or Ile or Val or Pro
  misc_feature (601)..(601): Absent or Thr or Ser or Lys or Asn or Val
  misc_feature (602)..(602): Absent or Asn or Ser or Phe or Gln or Thr
  misc_feature (603)..(603): Absent or Ser or Pro or Lys or Gly
  misc_feature (604)..(604): Absent or Arg or Val or Ile
  misc_feature (605)..(605): Absent or Ile or Pro or His
  misc_feature (606)..(606): Absent or Pro or Lys or Gln or Glu or Ser
  misc_feature (607)..(607): Absent or Val or Met or Lys or Ser or Pro or Asn or Ala or His
  misc_feature (608)..(608): Absent or Ile or Tyr or Gln or Ser or Asp or Leu
  misc_feature (609)..(609): Absent or Gln or Pro or Thr or Asp
  misc_feature (610)..(610): Absent or Lys or Asn or Gly or Pro or Gln or Ser
  misc_feature (611)..(611): Absent or His or Gly or Lys or Thr or Ser or Ala
  misc_feature (612)..(612): Absent or Glu or Lys or Leu or Ser or Ala or Gln
  misc_feature (613)..(613): Absent or Glu or Ala or Leu or Ile or Asn or Arg or Val
  misc_feature (614)..(614): Absent or Ala or Glu or Gln or His or Val or Asp or Asn or Arg or Thr
  misc_feature (615)..(615): Absent or Ser or His or Asn or Pro or Thr or Lys or Ala or Asp or Val
  misc_feature (616)..(616): Absent or Ser or Pro or Thr or Asn or Phe or Tyr
  misc_feature (617)..(617): Absent or Ser or Ala or Thr or Gln
  misc_feature (618)..(618): Absent or Glu or Gly or Ser or Ala or Thr or Asp
  misc_feature (619)..(619): Absent or Gln or Ala or His or Lys
  misc_feature (620)..(620): Absent or Glu or Thr or Asp
  misc_feature (621)..(621): Absent or Gln or Asn or Ser or Phe or Tyr
  misc_feature (622)..(622): Absent or Asp or Ser or Phe or Glu
  misc_feature (623)..(623): Absent or Ser or Thr or Asn or Leu
  misc_feature (624)..(624): Absent or Ala or Asn or Asp or Pro or Gln
  misc_feature (625)..(625): Absent or Ala or Gln or Cys or Ser
  misc_feature (626)..(626): Absent or Gly or Asp or Val or Met or Asn or Phe
  misc_feature (627)..(627): Absent or Thr or Ala or Glu or Asp or Ile or Leu or Pro
  misc_feature (628)..(628): Absent or Ala or Leu or Met or Phe or Val or Ser or Asn or Thr or Pro
  misc_feature (629)..(629): Absent or Phe or Tyr or Ala or Val or His or Thr or Lys
  misc_feature (630)..(630): Absent or Asn or Cys or Lys or Gly or Phe
  misc_feature (631)..(631): Absent or Ser or Ala or Lys or Asp or Gln or Glu
  misc_feature (632)..(632): Absent or Asn or Ser or Gln or Lys or Tyr or Thr or Pro or Ala
  misc_feature (633)..(633): Absent or Asn or Gln or Glu or Lys or Arg
  misc_feature (634)..(634): Absent or Ser or Ala or Thr or Val or Pro
  misc_feature (635)..(635): Absent or Ser or Gly
  misc_feature (636)..(636): Absent or Tyr or Phe or Ser or Asn or Gly or Asp or Ala or Val or Glu or Lys or His or Arg or Thr or Pro
  misc_feature (637)..(637): Absent or Lys or His or Arg or Cys or Gln or Glu or Asn or Gly or Tyr or Leu or Ser or Thr or Ala or Val or Asp or X or Met
  misc_feature (638)..(638): Absent or Leu or Pro or Gln or Gly or Ser or Glu or Asp or Phe or Thr or Arg or Met or Ile or Val or Ala or Cys
  misc_feature (640)..(640): Absent or Val or Ile or Met or Glu or Gly or Asp or Ser or Gln or Thr or Ala or Lys or Asn or Arg
  misc_feature (641)..(641): Absent or Ala or Val or Ser or Gly or Cys or Pro
  misc_feature (643)..(643): Thr or Absent or Pro or Ser or Ala or Asn or Gly or Lys
  misc_feature (646)..(646): Met or Absent or Gln or Leu or Tyr or Ile or Ala or Val or Thr or Asp or Trp
  misc_feature (647)..(647): Val or Ile or Leu or Absent or Pro or Met or Phe or Ala or Thr or Ser
  misc_feature (649)..(649): Asn or Absent or Lys or His or Asp or Ser or Gln or Arg or Gly or Ala or Glu or Thr or X or Cys
  misc_feature (650)..(650): Leu or Absent or Trp or Met or Ile or Val or Phe or Ala or Cys or Thr or His
  misc_feature (651)..(651): Leu or Absent or Asp or Ile or Tyr or Phe or Val or Met or X
  misc_feature (652)..(652): Thr or Val or Ile or Absent or Ser or His or Gly or Met or Ala or Glu or Gln or Arg or Asn or Lys or Leu or Tyr or Cys or Asp
  misc_feature (653)..(653): Val or Met or Ile or Gly or Absent or Thr or Ala or Cys or Asn or Lys or Glu or Asp or Tyr or Ser or Gln or Leu or Arg or His
  misc_feature (654)..(654): Ala or Ser or Absent or Leu or Val or Met or Gly or Asn or Phe or Tyr or Arg or Ile or Gln or Thr or Asp
  misc_feature (656)..(656): Val or Ala or Arg or Absent or Cys or Ile or Thr or Phe or Tyr or Leu or Ser or Met or Gly
  misc_feature (657)..(657): Asp or Lys or Ser or Absent or Asn or Glu or Arg or Ala or Thr or His or Cys or Gln or Gly
  misc_feature (659)..(659): Ile or Val or Pro or Absent or Cys or Leu or Met or Ala or Thr
  misc_feature (660)..(660): Ile or Val or Pro or Absent or Leu or Phe or Met or Tyr or Ala or Thr
  misc_feature (661)..(661): Thr or Ser or Ala or Absent or Val or Cys or Ile or Phe or Leu or Met
  misc_feature (662)..(662): Leu or Met or Val or Pro or Absent or Cys or Ile or Phe or Thr or Trp
  misc_feature (666)..(666): Ala or Pro or Absent or Asp or Glu or Ser or Asn or Lys or Val or Thr or Cys or Phe
  misc_feature (667)..(667): Ser or Asn or Pro or Absent or His or Arg or Lys or Leu or Val or Glu or Asp or Gly or Ala or Gln or Thr or Met
  misc_feature (669)..(669): Met or Leu or Absent or Phe or Tyr or Ile or Val or Ala or Thr or Glu or Ser or Cys
  misc_feature (675)..(675): Absent or Ser or Arg or Lys or Gln or Gly or Asp or His or Pro or Ala or Phe or Ile
  misc_feature (676)..(676): Absent or Ala or Thr or Val or Cys or Ile or Gly or Lys or Arg
  misc_feature (677)..(677): Arg or Val or Lys or Cys or Pro or Absent or Ile or Tyr or Ala or Gln or Glu or Thr or Met or Phe or Ser
  misc_feature (681)..(681): Asn or Arg or Lys or His or Absent or Leu or Val or Ile or Ala or Ser or Asp or Glu or Thr or Pro or Gln
  misc_feature (682)..(682): Leu or Ile or Absent or His or Asn or Glu or Asp or Thr or Ser or Lys or Tyr or Met or Phe or Ala or Val
  misc_feature (683)..(683): Tyr or His or Phe or Ile or Thr or Trp or Absent or Ala or Val or Gly or Ser or Pro or Met or Arg or Glu or Leu or Asn or Gln or Lys or Asp or X
  misc_feature (684)..(684): Ala or Gly or Ser or Cys or Absent or His or Thr or Arg or Asn or Leu or Met or Tyr or Pro or Val or Phe or Ile
  misc_feature (685)..(685): Glu or Gly or Ala or Lys or Arg or Absent or Tyr or Pro or Asn or Asp or His or Gln or Cys or Ser
  misc_feature (686)..(686): Pro or Ser or Thr or Ala or His or Absent or Gln or Glu or Leu or Val
  misc_feature (687)..(687): Asn or Thr or Ser or Phe or Leu or Ile or Ala or Absent or Val
  misc_feature (688)..(688): Ile or Leu or X or Asn or His or Thr or Ala or Val or Met or Absent or Phe or Gly or Arg or Gln or Glu or Trp or Tyr or Ser or Asp
  misc_feature (689)..(689): Ala or Gly or Pro or Gln or Lys or Arg or Met or Ile or Leu or Absent or Val or Asn or Asp or His or Glu or Ser or Phe or Thr or Tyr or Trp or Cys or X
  misc_feature (690)..(690): Glu or Gln or Arg or Lys or Asn or Gly or Ala or His or Absent or Leu or Ser or Tyr or Trp or Thr or Ile or Val or Met
  misc_feature (691)..(691): Absent or Leu or Phe or Ile or Val or His or Ala or Gly or Met or Arg or Thr
  misc_feature (692)..(692): Absent or Thr or Ala or Gly or Lys or Arg or Ser or Ile or Val or Cys or Leu or Phe or Met or Asn or Tyr or Glu
  misc_feature (693)..(693): Absent or Arg or Lys or Asp or Glu or Pro or Gly or Phe or Asn or Met
  misc_feature (694)..(694): Absent or Ile or Leu or Val or Arg or Ala or His
  misc_feature (695)..(695): Absent or Gly
  misc_feature (696)..(696): Absent or Ile
  misc_feature (697)..(697): Absent or Ala or Asp or Asn or Glu or Arg or Thr or Lys or Gln or Ser or Phe or Pro or Gly or His or Leu or Ile or Val
  misc_feature (698)..(698): Absent or Asp or Glu or Arg or Lys or Gly or Tyr or His or Ser or Ala or Thr or Asn or Gln
  misc_feature (699)..(699): Trp or Gly or Leu or Tyr or Absent or His or Glu or Thr or Ala or Phe or Ile or Val or Asn or Asp or Met or Pro or Arg or X
  misc_feature (700)..(700): Ile or Asn or Ser or Thr or Absent or Met or Leu or Phe or Val or Tyr or Gly or His or Ala or Lys or Arg or Trp or Gln or Glu
  misc_feature (701)..(701): Arg or Gln or Lys or Ser or Leu or Ile or Met or Absent or Val or Thr or Glu or Ala or Gly or Asp or His or Asn or Trp or Tyr or Cys
  misc_feature (702)..(702): Arg or His or Glu or Asn or Ile or Leu or Thr or Asp or Phe or Ser or Absent or Ala or Gln or Lys or Gly or Pro or Met or Cys
  misc_feature (703)..(703): Asn or His or Val or Ile or Arg or Glu or Gln or Phe or Tyr or Absent or Leu or Cys or Ala or Lys or Thr or Asp or Gly or Pro or Ser or Met
  misc_feature (704)..(704): Val or Ile or Cys or Lys or Glu or Ser or Met or Absent or His or Asn or Thr or Asp or Gly or Ala or Tyr or Arg or Leu or Phe or Pro or Gln
  misc_feature (705)..(705): Asp or Pro or Ser or Glu or Ala or Cys or Gln or Val or Ile or Absent or Phe or Tyr or Thr or Leu or Asn or Gly or Lys or Arg or Met or His
  misc_feature (706)..(706): Asp or Asn or Gly or Arg or Lys or Tyr or Glu or Pro or Absent or Met or Ser or Leu or Ile or Thr or Gln or Val or Ala or His or Cys or Phe
  misc_feature (707)..(707): Trp or Tyr or Leu or His or Asn or Gly or Val or Absent or Ile or Gln or Lys or Phe or Thr or Pro or Ala or Asp or Glu or Ser or Met or Cys
  misc_feature (708)..(708): Glu or Lys or Ala or Arg or Gln or His or Absent or Gly or Asn or Thr or Ser or Asp or Leu or Tyr or Phe or Trp or Ile or Met or Pro or Val
  misc_feature (709)..(709): Absent or Val or Asn or Lys or Asp or Ser or Pro or Arg or Gln or Ala or Glu or Thr or Gly or Leu or Ile or His
  misc_feature (710)..(710): Absent or Asn or Glu or Asp or Leu or Met or Ile or Thr or Pro or Arg or Ser or Lys or Ala or Tyr or Phe or His
  misc_feature (711)..(711): Absent or Gly
  misc_feature (712)..(712): Absent or Gln
  misc_feature (713)..(713): Absent or Pro
  misc_feature (714)..(714): Absent or Gly
  misc_feature (715)..(715): Absent or Asp
  misc_feature (716)..(716): Absent or Trp or His
  misc_feature (717)..(717): Absent or Lys or Gln or His or Leu or Ser or Arg or Asn or Glu or Gly or Asp or Thr or Met or Ile or Phe or Pro
  misc_feature (718)..(718): Glu or Asp or Asn or His or Absent or Leu or Ser or Gln or Lys or Pro or Thr or Arg or Gly
  misc_feature (719)..(719): Ala or Absent or Glu or Cys or Val or Ile or Leu or Ser or Thr or Phe or Pro or Gly or Met or Tyr or Gln or Lys
  misc_feature (720)..(720): Val or Absent or Ile or Met or Ala or Leu or Tyr or Phe or Thr or Cys or Lys or Gln
  misc_feature (726)..(726): Pro or Ala or Absent or Ser or Thr or Glu or Ile or Val or Leu or Lys or Asp or Arg or Met or Phe or Tyr or His or Cys or Asn
  misc_feature (730)..(730): Lys or Absent or Asp or Glu or Ser or Asn or His or Gly or Gln or Arg or Phe or Tyr or Pro or Val or Thr or Ile or Ala or Met
  misc_feature (734)..(734): Ser or Ala or Absent or Lys or Leu or Thr or Gly or Phe or Gln or Asp or Glu or His or Asn or Arg or Val or Met or Ile or Pro or Tyr
  misc_feature (735)..(735): Leu or Absent or Val or Ile or Tyr or Phe or Trp or Met or His or Arg or Ala or Asn or Thr
  misc_feature (737)..(737): Asp or Absent or Ser or Glu or Gln or Ala or Arg or Lys or Asn or Tyr or Ile or Thr or Gly or Trp
  misc_feature (738)..(738): Thr or Ala or Ser or Val or Absent or Gly or Gln or Lys or Arg or His or Asn or Leu or Ile or Tyr or Glu or Met or Phe or Cys
  misc_feature (740)..(740): Asn or Lys or Absent or Gly or Glu or Cys or Asp or Tyr or Gln or Ser or Ala or Thr or Met or His or Arg or Leu or Phe
  misc_feature (741)..(741): Absent or Lys or Ser or Arg or Ala or Gly or Asn or Asp or Tyr or His or Thr or Glu or Gln or Pro or Leu
  misc_feature (742)..(742): Absent or Pro or Val or Arg or Leu or Lys or Asn or Gln or Gly or Met or Ser or Asp
  misc_feature (743)..(743): Absent or Leu or Ile or Ser or Tyr or Arg or Ala or Thr or Gln
  misc_feature (744)..(744): Absent or Gly or Lys or Asn or Glu or Cys
  misc_feature (745)..(745): Absent or Asn or Trp or Leu or Met or Val or Ile or Cys
  misc_feature (746)..(746): Absent or Ala or Asn or Ser or Asp or Gly or Glu or Lys or Met or Leu
  misc_feature (747)..(747): Absent or Met or Leu or Cys or Lys or Arg or Asn or His
  misc_feature (748)..(748): Absent or Ile or Leu or Glu or Pro or Asp or Ser or Asn or Gly or Thr or Ala
  misc_feature (749)..(749): Leu or Ile or Absent or Met or Cys or Thr or Val or Tyr or Ala or Arg or Phe or Ser or Gly or Asp or Asn or Glu
  misc_feature (750)..(750): Asp or Asn or Absent or Pro or Ser or Gln or Glu or Gly or Ala or Lys or Arg or Thr or Leu or His or Tyr
  misc_feature (751)..(751): Phe or Absent or Glu or Val or Thr or Gln or Ala or Met or Trp or Cys or Tyr or His or Leu or Ile
  misc_feature (754)..(754): Ile or Val or Absent or Phe or Tyr or Ala or Met or Leu or Cys or Gly
  misc_feature (759)..(759): Gln or Arg or Lys or Absent or Pro or Asp or Ser or Thr or Ile or Val or His or Leu or Met or Phe or Tyr or Ala or Glu or Asn
  misc_feature (760)..(760): Arg or Absent or Thr or Lys or Leu or Pro or Ile or Val or Ser or Gly or Asn or Ala or Glu or Asp
  misc_feature (761)..(761): Ser or Asn or Thr or Ala or Gln or Gly or Val or Pro or Absent
  misc_feature (762)..(762): Ser or His or Gln or Lys or Gly or Absent or Asp
  misc_feature (763)..(763): Absent or Gly
  misc_feature (764)..(764): Absent or Asn
  misc_feature (765)..(765): Absent or Met
  misc_feature (766)..(766): Absent or Thr
  misc_feature (767)..(767): Absent or Ala
  misc_feature (768)..(768): Absent or Ser
  misc_feature (769)..(769): Absent or Met
  misc_feature (770)..(770): Absent or Ile
  misc_feature (771)..(771): Absent or Leu or Met
  misc_feature (772)..(772): Absent or Pro or Tyr or Glu or Arg
  misc_feature (773)..(773): Absent or Gly or Asn or Gln or His
  misc_feature (774)..(774): Absent or Pro or Gln or Leu or Phe
  misc_feature (775)..(775): Absent or Asn or Asp
  misc_feature (776)..(776): Absent or Thr or Ser or Arg or His
  misc_feature (777)..(777): Absent or Leu or Met or Pro or Asn
  misc_feature (778)..(778): Absent or Ala or Thr or Asp or Val
  misc_feature (779)..(779): Absent or Asp or Pro
  misc_feature (780)..(780): Absent or Ser or Val or Arg
  misc_feature (781)..(781): Absent or Lys or Asp or Thr or Ala or Gln
  misc_feature (782)..(782): His or Pro or Glu or Gly or Leu or Val or Ile or Absent
  misc_feature (783)..(783): Phe or Tyr or Pro or Thr or Absent
  misc_feature (784)..(784): Ser or Ala or Val or Phe or Thr or Pro or Absent
  misc_feature (785)..(785): Gln or Ser or Lys or Glu or Asp or Leu or Absent
  misc_feature (786)..(786): Asn or Met or Absent or Lys or His or Thr or Ala or Ser or Asp or Glu
  misc_feature (787)..(787): Absent or Leu or Lys or Arg or Val or Gly or Ser
  misc_feature (788)..(788): Absent or Asn or Asp or Gly
  misc_feature (789)..(789): Absent or Leu or Met or Lys or Gln or His or Val or Arg
  misc_feature (790)..(790): Absent or Ala or Gln or Lys or Leu or Glu or Asn or Pro
  misc_feature (791)..(791): Absent or Gln or Thr or Leu or Ile
  misc_feature (792)..(792): Absent or Ala or Leu or Thr or Pro
  misc_feature (793)..(793): Absent or Pro or Asn or Tyr
  misc_feature (794)..(794): Absent or Ile or Val or Thr or Arg
  misc_feature (795)..(795): Absent or Phe or Arg or Ala or Gly
  misc_feature (796)..(796): Absent or Ser or Asn or Glu or Pro
  misc_feature (797)..(797): Absent or Val or Ala or Pro
  misc_feature (798)..(798): Absent or Ala or Glu or Pro or Gln
  misc_feature (799)..(799): Absent or Ser or Phe or Ala
  misc_feature (800)..(800): Absent or Pro or Gln or Glu
  misc_feature (801)..(801): Absent or Arg or Pro or Asn
  misc_feature (802)..(802): Absent or Lys or Arg or Leu or Ala
  misc_feature (803)..(803): Absent or Lys or Asn or Asp or Val
  misc_feature (804)..(804): Absent or Gly or Val or Glu
  misc_feature (805)..(805): Absent or Ala or Ser or Thr
  misc_feature (806)..(806): Absent or Arg or His or Ser or Asp
  misc_feature (807)..(807): Absent or Gly
  misc_feature (808)..(808): Absent or Ala
  misc_feature (809)..(809): Absent or Pro
  misc_feature (810)..(810): Absent or Pro
  misc_feature (811)..(811): Absent or Thr
  misc_feature (812)..(812): Absent or Val
  misc_feature (813)..(813): Absent or Leu
  misc_feature (814)..(814): Absent or Pro
  misc_feature (815)..(815): Absent or Ala
  misc_feature (816)..(816): Absent or Pro
  misc_feature (817)..(817): Absent or Gly
  misc_feature (818)..(818): Absent or Ser
  misc_feature (819)..(819): Absent or Pro
  misc_feature (820)..(820): Absent or Leu
  misc_feature (821)..(821): Absent or Asn
  misc_feature (822)..(822): Absent or Gly
  misc_feature (823)..(823): Absent or Thr or Arg or Glu or Val or Trp
  misc_feature (824)..(824): Absent or Ala or Thr
  misc_feature (825)..(825): Absent or Arg or Ser or Thr or Pro
  misc_feature (826)..(826): Absent or Arg or Leu or Ser or Lys
  misc_feature (827)..(827): Absent or Ala or Pro or Ser or Arg or Lys
  misc_feature (828)..(828): Absent or Ser or Pro or Thr or Lys or Glu
  misc_feature (829)..(829): Absent or Met or Leu or Arg or Thr
  misc_feature (830)..(830): Absent or Lys or Pro or Arg
  misc_feature (831)..(831): Absent or Leu or Lys or Arg or Val or Pro
  misc_feature (832)..(832): Absent or Gln or Glu or Pro or Val
  misc_feature (833)..(833): Absent or Asp or Gln or Ala or Arg
  misc_feature (834)..(834): Absent or Gly or Asp or Thr
  misc_feature (835)..(835): Absent or Pro or Ile or Ser or Arg
  misc_feature (836)..(836): Absent or Asn or Phe or Arg or Ile
  misc_feature (837)..(837): Absent or Thr or Ile or Leu or Gly or Val
  misc_feature (838)..(838): Absent or Thr or Ala or Asn or Ser
  misc_feature (839)..(839): Absent or His or Arg or Ser or Pro or Asn
  misc_feature (840)..(840): Absent or Gly or Thr or Ser or Lys
  misc_feature (841)..(841): Absent or Thr or His or Ser or Arg or Gln
  misc_feature (842)..(842): Absent or Val or Ile or Leu or Gly
  misc_feature (843)..(843): Absent or Pro or Glu or Ser
  misc_feature (844)..(844): Absent or Ser or Asn or Asp or Val or Pro
  misc_feature (845)..(845): Absent or Arg or Pro or Thr
  misc_feature (846)..(846): Absent or Arg or Asp or Phe or Thr
  misc_feature (847)..(847): Absent or Lys or Ala or Ile or Asn or Val
  misc_feature (848)..(848): Absent or Ser or Leu or Asp or Gly
  misc_feature (849)..(849): Absent or Ser or Gln or Ala or Arg
  misc_feature (850)..(850): Absent or Asn or Lys or Arg or Ser or Gln
  misc_feature (851)..(851): Absent or Thr or Leu or Gln or Met or Arg or Pro or Ala
  misc_feature (852)..(852): Absent or Arg or Glu or Asn or Val
  misc_feature (853)..(853): Phe or Lys or Absent or Asn or Ser or Thr or Val
  misc_feature (854)..(854): Glu or Pro or Lys or Gln or Leu or Ser or Absent
  misc_feature (855)..(855): Asp or Ser or Lys or Ala or His or Absent
  misc_feature (856)..(856): Ser or Gln or Glu or Ala or Met or Leu or Asp or Thr or Pro or Absent
  misc_feature (857)..(857): Ile or Leu or Asn or Absent
  misc_feature (858)..(858): Met or Gly or Lys or Arg or Asn or Pro or Gln or Absent
  misc_feature (859)..(859): Asp or Gly or Gln or Thr or Lys or Glu or Absent
  misc_feature (860)..(860): Glu or Arg or Ala or Ser or Asn or Leu or Absent
  misc_feature (861)..(861): Thr or Arg or Gln or Lys or Asp or Glu or Pro or Absent
  misc_feature (862)..(862): Glu or Pro or Ile or Ser or Val or Absent
  misc_feature (863)..(863): Ala or Ser or Ile or Val or Leu or Arg or Asp or Absent
  misc_feature (864)..(864): Thr or Leu or Absent or Arg or Ile or Val or Glu or Ser
  misc_feature (865)..(865): Glu or Asn or Absent or Val or Arg or Pro
  misc_feature (866)..(866): Thr or Pro or Absent or Gln or Glu or Lys or Ala
  misc_feature (867)..(867): His or Gly or Absent or Thr or Ser or Glu
  misc_feature (868)..(868): Absent or Glu or Pro or Gly or Gln
  misc_feature (869)..(869): Absent or Glu or Ser or Phe or Ala or Pro or Arg
  misc_feature (870)..(870): Absent or Gly or Glu or Ala
  misc_feature (871)..(871): Absent or Glu or Ala or Gly
  misc_feature (872)..(872): Absent or Asp or Arg or Ala or Ser or Asn
  misc_feature (873)..(873): Absent or Asp or Arg or Ser or Val or Pro
  misc_feature (874)..(874): Absent or Val or Pro or His or Asp or Lys
  misc_feature (875)..(875): Absent or Phe or Ser or Asp or Gly
  misc_feature (876)..(876): Absent or Asp or Glu or Asn or Ser
  misc_feature (877)..(877): Absent or Asp or Ile or Ala or Leu or Gly or Val
  misc_feature (878)..(878): Absent or Glu or Asp or His or Phe or Ala or Asn
  misc_feature (879)..(879): Val or Glu or Absent or Pro or Ala or Thr or Asp or Gly
  misc_feature (880)..(880): Thr or Asp or Glu or Asn or Val or Ala or Absent
  misc_feature (881)..(881): Asn or Glu or Asp or Thr or Absent
  misc_feature (882)..(882): Cys or Gly or Glu or Asp or Absent
  misc_feature (883)..(883): Ser or Val or Glu or Tyr or Absent
  misc_feature (884)..(884): Val or His or Asp or Asn or Thr or Absent
  misc_feature (885)..(885): Tyr or Ile or Asn or Asp or Absent
  misc_feature (886)..(886): Leu or Val or Ile or Glu or Gly or His or Absent
  misc_feature (887)..(887): Asp or Thr or Val or Leu or Arg or Lys or Absent or Ser
  misc_feature (888)..(888): Arg or Ala or Ser or Thr or Val or Pro or Absent or His
  misc_feature (889)..(889): Pro or His or Absent or Asn or Arg or Asp or Ser
  misc_feature (890)..(890): Arg or Gly or Glu or Asp or Absent
  misc_feature (891)..(891): Ile or Val or Leu or Met or Absent or Gln
  misc_feature (892)..(892): His or Gln or Ile or Val or Thr or Absent or Ser
  misc_feature (893)..(893): Thr or His or Gln or Absent or Ser
  misc_feature (894)..(894): Ala or Gly or Absent or Phe
  misc_feature (895)..(895): Lys or Arg or Asn or Absent
  misc_feature (896)..(896): Tyr or Val or Ile or Leu or Ser or Absent or Ala
  misc_feature (897)..(897): Leu or Val or Arg or Ile or Phe or Absent or Ser
  misc_feature (898)..(898): Leu or Gln or Asn or Lys or Trp or Pro or Absent
  misc_feature (899)..(899): Gly or Glu or Asn or Lys or Absent or Ser or Arg or Thr or Leu or Asp or Ala or Pro or Val or Gln or Tyr or His
  misc_feature (900)..(900): His or Arg or Ala or Absent or Ser or Gly or Val or Lys or Leu or Glu or Gln or Pro or Asp or Asn or Thr
  misc_feature (901)..(901): Ile or Val or Leu or Arg or Absent or Lys or Gln or Ala or Pro or Asn or His or Thr or Ser or Asp or Phe or Gly or Glu or Met or Tyr
  misc_feature (902)..(902): Ile or Val or Ser or His or Pro or Ala or Arg or Absent or Lys or Asn or Asp or Gly or Glu or Thr or Cys or Phe
  misc_feature (903)..(903): Asp or Gly or Pro or Glu or Lys or Ile or Thr or Gln or Absent or Ala or Val or Ser or Asn or His or Leu or Arg or Phe or Met
  misc_feature (904)..(904): Asp or Leu or Lys or Arg or Ile or Absent or Val or Ser or Gln or Ala or Asn or Gly or Glu or Thr or Cys or Pro or Phe or Met
  misc_feature (905)..(905): Glu or Asp or Lys or Arg or Leu or Absent or Pro or Ala or His or Gly or Val or Gln or Met or Ile
  misc_feature (906)..(906): Glu or Tyr or Val or Phe or Lys or Absent or Asn or Ala or Ser
  misc_feature (907)..(907): Absent or Leu or Gln or Pro or Glu or Ala or Ser or Gly or Asn or Thr or Arg or Val
  misc_feature (908)..(908): Absent or Glu or Asp or Pro or Ser or Ile or Met or Leu
  misc_feature (909)..(909): Absent or Glu or Ser or Pro or Arg or Cys or Thr
  misc_feature (910)..(910): Absent or Glu or Asn or Ser or Asp or Gly or Ala or Leu
  misc_feature (911)..(911): Absent or Leu or Thr or Arg or Ala or Pro
  misc_feature (912)..(912): Absent or Gly or Ser or Thr or Lys or Asn or Gln
  misc_feature (913)..(913): Absent or Pro or Ser or Ala or Val or Leu or Ile or Met or Lys
  misc_feature (914)..(914): Absent or Thr or Ala or Val or Ser or Pro
  misc_feature (915)..(915): Absent or Ser or Ala or Asp or Gly or Asn or Pro
  misc_feature (916)..(916): Absent or Met or Ala or Gly or Asp or Ser or Thr or Leu
  misc_feature (917)..(917): Absent or Ala or Ser or Gly or His or Pro
  misc_feature (918)..(918): Absent or Val or Leu or Gly or Ser or Thr
  misc_feature (919)..(919): Absent or Ser or Pro or Met or Val or Leu or Gly
  misc_feature (920)..(920): Absent or Gly or Pro or Ser
  misc_feature (921)..(921): Absent or Asp or Leu or Val or Arg
  misc_feature (922)..(922): Absent or Ala or Asn or Ser
  misc_feature (923)..(923): Absent or Thr or Val or Pro or Ser
  misc_feature (924)..(924): Absent or Pro or Thr or Lys or Arg or Phe
  misc_feature (925)..(925): Absent or Gly or Val or Pro or Asp
  misc_feature (926)..(926): Absent or Gln or Glu or Leu or Asp
  misc_feature (927)..(927): Absent or Leu or Arg or Ile or Val
  misc_feature (928)..(928): Absent or Pro or Thr or Ser or Glu or Ala or Arg
  misc_feature (929)..(929): Absent or Asn or Ser or Thr
  misc_feature (930)..(930): Absent or Leu or Gly
  misc_feature (931)..(931): Absent or Asn or Asp or Val
  misc_feature (932)..(932): Absent or Ser
  misc_feature (933)..(933): Absent or Ser or Thr
  misc_feature (934)..(934): Absent or Gln or Pro
  misc_feature (935)..(935): Absent or Asn or Met
  misc_feature (936)..(936): Absent or Thr or Ala or Ser
  misc_feature (937)..(937): Absent or Thr or Ser
  misc_feature (938)..(938): Absent or Ser or Ile
  misc_feature (939)..(939): Absent or Ser or Ala or Tyr
  misc_feature (940)..(940): Absent or Gly or Leu
  misc_feature (941)..(941): Absent or Ala or Pro or Leu
  misc_feature (942)..(942): Absent or Thr or Ser or Asp
  misc_feature (943)..(943): Absent or Gly
  misc_feature (944)..(944): Absent or Val or Thr
  misc_feature (945)..(945): Absent or Ala or Gly
  misc_feature (946)..(946): Absent or Leu
  misc_feature (947)..(947): Absent or Asn
  misc_feature (948)..(948): Absent or Ser
  misc_feature (949)..(949): Absent or Lys
  misc_feature (950)..(950): Absent or Ala
  misc_feature (951)..(951): Absent or Thr
  misc_feature (952)..(952): Absent or Val
  misc_feature (953)..(953): Absent or Gly
  misc_feature (954)..(954): Absent or Gln
  misc_feature (955)..(955): Absent or Ala
  misc_feature (956)..(956): Absent or Thr
  misc_feature (957)..(957): Absent or Asp
  misc_feature (958)..(958): Absent or Lys
  misc_feature (959)..(959): Absent or Leu
  misc_feature (960)..(960): Absent or Asn
  misc_feature (961)..(961): Absent or Ala
  misc_feature (962)..(962): Absent or Leu
  misc_feature (963)..(963): Absent or Ser
  misc_feature (964)..(964): Absent or Val
  misc_feature (965)..(965): Absent or Ser
  misc_feature (966)..(966): Absent or Ala
  misc_feature (967)..(967): Absent or Glu
  misc_feature (968)..(968): Absent or Ser
  misc_feature (969)..(969): Absent or Gln
  misc_feature (970)..(970): Absent or Ser
  misc_feature (971)..(971): Absent or Phe
  misc_feature (972)..(972): Absent or Thr
  misc_feature (973)..(973): Absent or Ser
  misc_feature (974)..(974): Absent or Thr
  misc_feature (975)..(975): Absent or Gln
  misc_feature (976)..(976): Absent or Gln
  misc_feature (977)..(977): Absent or Ser
  misc_feature (978)..(978): Absent or Ile
  misc_feature (979)..(979): Absent or Gly
  misc_feature (980)..(980): Absent or Ser
  misc_feature (981)..(981): Absent or Lys
  misc_feature (982)..(982): Absent or His
  misc_feature (983)..(983): Absent or Val
  misc_feature (984)..(984): Absent or Tyr
  misc_feature (985)..(985): Absent or Ser or Phe or Glu
  misc_feature (986)..(986): Absent or Glu or Ile or Gln
  misc_feature (987)..(987): Absent or Ser or Ala or Val or Pro or Asp or Glu or Tyr
  misc_feature (988)..(988): Ile or Glu or Asn or Pro or Asp or Ser or Absent or Ala
  misc_feature (989)..(989): Ile or Ala or Gly or Gln or Asp or Ser or Glu or Absent or Asn
  misc_feature (990)..(990): Thr or Gln or Asp or Ala or Absent or Tyr or Pro or Gly
  misc_feature (991)..(991): Thr or Ser or Absent or Pro or Glu or Asp or His or Ile or Met
  misc_feature (992)..(992): Pro or Glu or Absent or Ile or Asp or Ala or Ser or Leu or Met or Thr or Lys
  misc_feature (993)..(993): Ala or Absent or Thr or Val or Asp or Met or Cys
  misc_feature (994)..(994): Ser or Glu or Absent or Asn or Ile or Ala or Val or Pro or Asp
  misc_feature (995)..(995): Val or Thr or Absent or Gly or Leu or Met or Ile or His or Glu
  misc_feature (996)..(996): Cys or Arg or Absent or Ile or Glu or Gln or Val or Ser or Ala or Thr
  misc_feature (997)..(997): Ser or Pro or Absent or Ala or Asp or Glu or Gly
  misc_feature (998)..(998): Glu or Arg or Ser or His or Asp or Absent
  misc_feature (999)..(999): Asp or Leu or Glu or Ser or Ala or Gly or Gln or Val or Phe or Absent or Trp
  misc_feature (1000)..(1000): Tyr or Gln or His or Asn or Glu or Val or Phe or Absent or Ile
  misc_feature (1001)..(1001): Ala or His or Leu or Asp or Gly or Ser or Gln or Val or Absent or Met
  misc_feature (1002)..(1002): Gln or Thr or Ala or Glu or His or Ser or Pro or Tyr or Absent
  misc_feature (1003)..(1003): Glu or Asp or Lys or Thr or Ser or Ile or Leu or Absent
  misc_feature (1004)..(1004): Val or Ser or Glu or Ala or Ile or Gly or Asn or Pro or Thr or Absent
  misc_feature (1005)..(1005): Asn or Ser or Gly or Asp or Thr or Absent or Gln
  misc_feature (1006)..(1006): Absent or Val or Ile or Gly or Met or Phe
  misc_feature (1007)..(1007): Absent or Asp or Leu or Ile or Pro or Gln or His
  misc_feature (1008)..(1008): Absent or Leu or Asp or Gly or Pro
  misc_feature (1009)..(1009): Absent or Lys or Ser or Thr or Asp or Glu or Val
  misc_feature (1010)..(1010): Absent or His or Asp or Tyr or Gln or Gly or Arg
  misc_feature (1011)..(1011): Absent or Ala or Val or Gly or Thr or Pro or Ser or Arg
  misc_feature (1012)..(1012): Leu or Ile or Ala or Absent or Thr or Gly
  misc_feature (1013)..(1013): Tyr or Gly or Absent or Glu or Arg
  misc_feature (1014)..(1014): Ser or Gly or Absent or Met
  misc_feature (1015)..(1015): Gln or Ser or Thr or Absent or Lys or Arg
  misc_feature (1016)..(1016): Gly or Val or Tyr or Phe or Absent or Lys or Arg
  misc_feature (1017)..(1017): Gly or Asp or Glu or Absent or Thr or Ser
  misc_feature (1018)..(1018): Cys or Ala or Absent or Thr or Ser or Ile
  misc_feature (1019)..(1019): Pro or Glu or Thr or Val or Ala or Absent or Ser
  misc_feature (1020)..(1020): Ser or Gly or Asn or Asp or Val or Ala or Absent or Thr
  misc_feature (1021)..(1021): Asp or Ser or Absent or Ala or Glu or Gly
  misc_feature (1022)..(1022): Asp or Glu or Ser or Absent
  misc_feature (1023)..(1023): Asp or Glu or Absent or Ser or Ile or Thr or Leu or Lys or Phe or Gly or Val
  misc_feature (1024)..(1024): Glu or Asp or Absent or Thr or Arg or Ser or His or Ala or Asn
  misc_feature (1025)..(1025): Glu or Asp or Absent or Thr or Ser or Gly or Asn or His
  misc_feature (1026)..(1026): Glu or Asp or Absent or Val or Ser or Gln or Asn or Lys or His or Pro or Arg or Ala
  misc_feature (1027)..(1027): Asn or Absent or Thr or Pro or Ile or Val or Glu or Ala or Gly or Asp or Lys or Leu or Ser or Tyr or His or Gln or Arg
  misc_feature (1028)..(1028): Ile or Absent or Thr or Pro or Ser or Asp or Lys or Ala or Gly or Asn or Tyr
  misc_feature (1029)..(1029): Met or Glu or Thr or Ser or Val or Asp or Gln or Ala or Leu or Phe or Absent or Asn
  misc_feature (1030)..(1030): Ser or Phe or Met or Leu or Ala or Glu or Lys or Gln or Absent or Asn or Asp
  misc_feature (1031)..(1031): Ala or Absent or Arg or Gly or Ser or His or Glu
  misc_feature (1032)..(1032): Ser or Absent or Asn or Asp or Glu or Ala or Lys
  misc_feature (1033)..(1033): Ile or Absent or Val or Ser or Pro or Asn or Glu
  misc_feature (1034)..(1034): Tyr or Gln or Ser or Asn or Val or Lys or Glu or Arg or Gly or Absent or Asp or Thr or Ile
  misc_feature (1035)..(1035): Ala or Arg or Glu or Leu or Lys or Pro or Gln or His or Ile or Absent or Gly or Tyr or Phe or Met or Ser or Val
  misc_feature (1036)..(1036): Glu or Absent or Val or Ile or Ser
  misc_feature (1037)..(1037): Arg or Lys or Gln or His or Absent or Ile or Asn or Thr or Ala or Pro or Val or Glu or Ser or Asp
  misc_feature (1038)..(1038): Met or Leu or Thr or Absent or Tyr or Ser or Arg or Lys or Ile or Val or His or Glu or Ala or Gln or Pro
  misc_feature (1039)..(1039): Ile or Absent or Val or Thr or Leu or Met or Glu or Ser or Gly or Ala or Lys or Tyr or His or Asn or Phe or Gln or Arg
  misc_feature (1040)..(1040): Thr or Absent or Gln or Glu or Met or Ile or Leu or Val or Gly or Lys or Ser or Arg or His or Pro or Asn or Tyr or Asp or Phe or Ala
  misc_feature (1041)..(1041): Leu or Absent or Val or Ile or Lys or Asn or Ala or Pro or Gly or Thr or Met
  misc_feature (1042)..(1042): Val or Absent or Gly or Asn or Leu or Ser or Lys or Pro or Ile or Ala or Thr
  misc_feature (1044)..(1044): Absent or Gly or Leu or Ile or Val or Ala or Asp
  misc_feature (1045)..(1045): Asp or Asn or Absent or Ser or Gln or His or Glu or Arg or Pro or Ala or Lys
  misc_feature (1047)..(1047): Asn or Arg or Lys or Gln or Absent or Ser or Ala or Glu or Thr or Asp or His or Met or Val or Gly or Tyr or Phe
  misc_feature (1048)..(1048): Absent or Gly
  misc_feature (1049)..(1049): Absent or Lys
  misc_feature (1050)..(1050): Absent or Val
  misc_feature (1051)..(1051): Absent or Val
  misc_feature (1052)..(1052): Absent or Val
  misc_feature (1053)..(1053): Absent or Met
  misc_feature (1054)..(1054): Absent or Leu
  misc_feature (1055)..(1055): Absent or Ser
  misc_feature (1056)..(1056): Absent or Asp
  misc_feature (1057)..(1057): Absent or Ala
  misc_feature (1058)..(1058): Absent or Pro
  misc_feature (1059)..(1059): Absent or Leu
  misc_feature (1060)..(1060): Absent or Ala
  misc_feature (1061)..(1061): Absent or Ile
  misc_feature (1062)..(1062): Absent or Val
  misc_feature (1063)..(1063): Absent or Asp
  misc_feature (1064)..(1064): Absent or Lys
  misc_feature (1065)..(1065): Absent or Arg
  misc_feature (1066)..(1066): Absent or Arg
  misc_feature (1067)..(1067): Absent or Pro
  misc_feature (1068)..(1068): Absent or Gly
  misc_feature (1069)..(1069): Absent or His
  misc_feature (1070)..(1070): Absent or Asn
  misc_feature (1071)..(1071): Absent or Gln
  misc_feature (1072)..(1072): Absent or Ala
  misc_feature (1073)..(1073): Absent or Glu
  misc_feature (1074)..(1074): Absent or Val
  misc_feature (1075)..(1075): Absent or Val
  misc_feature (1076)..(1076): Absent or His
  misc_feature (1077)..(1077): Absent or Leu
  misc_feature (1078)..(1078): Absent or Ile
  misc_feature (1079)..(1079): Absent or His
  misc_feature (1080)..(1080): Absent or Asp
  misc_feature (1081)..(1081): Absent or Val
  misc_feature (1082)..(1082): Absent or Arg
  misc_feature (1084)..(1084): Lys or Arg or Absent or Cys or Glu or Met or Ala or Tyr or His
  misc_feature (1085)..(1085): Thr or Val or Ser or Absent or Asp or Glu or Ile or Leu or Asn or Cys or His or Arg or Ala or Met or Gln or Lys or Tyr or Phe
  misc_feature (1086)..(1086): Ala or Val or Absent or Cys or Thr or Ser or Pro or Ile
  misc_feature (1087)..(1087): Leu or Ile or Phe or Absent or Val or Trp
  misc_feature (1088)..(1088): Leu or Ile or Absent or Met or Val or Thr or Phe
  misc_feature (1089)..(1089): Ile or Val or Leu or Absent or Ala or Ser or Met or Thr or Tyr or Phe or Cys
  misc_feature (1092)..(1092): Thr or Met or Absent or Gly or Leu or Ile or Glu
  misc_feature (1093)..(1093): Ile or Absent or Ala or Cys or Val or Leu or Thr or Met
  misc_feature (1096)..(1096): Pro or His or Ser or Ala or Absent or Val or Ile or Gly or Cys or Thr
  misc_feature (1097)..(1097): Absent or Asp
  misc_feature (1098)..(1098): Absent or Ile
  misc_feature (1099)..(1099): Absent or Ser
  misc_feature (1100)..(1100): Absent or Leu
  misc_feature (1101)..(1101): Absent or Pro
  misc_feature (1102)..(1102): Absent or Asn
  misc_feature (1103)..(1103): Absent or Ile
  misc_feature (1104)..(1104): Absent or Asn
  misc_feature (1105)..(1105): Absent or Ile
  misc_feature (1106)..(1106): Absent or Leu
  misc_feature (1107)..(1107): Absent or Met
  misc_feature (1108)..(1108): Absent or Lys
  misc_feature (1109)..(1109): Absent or Pro
  misc_feature (1110)..(1110): Absent or Ile
  misc_feature (1111)..(1111): Absent or Lys
  misc_feature (1112)..(1112): Absent or Leu
  misc_feature (1115)..(1115): Phe or Leu or Trp or Absent or Ala or Asn or Ile or Val or Met or Ser
  misc_feature (1116)..(1116): Ile or Val or Absent or Leu or Thr or Asn or Ala or Arg or Ser or Glu or Cys or Gly or Met or Phe or Asp or Gln or His or Tyr
  misc_feature (1117)..(1117): Val or Ala or Ser or Absent or Met or Arg or Leu or His or Lys or Gln or Asn or Glu or Gly or Thr or Ile or X
  misc_feature (1120)..(1120): Glu or Absent or Leu or Thr or Lys or Gly or Gln or Ser or Asp or Ala or Arg or Asn or Ile or His or Tyr or Val
  misc_feature (1121)..(1121): His or Thr or Ala or Absent or Ile or Leu or Phe or Val or Gln or Lys or Asn or Ser or Asp or Met or Cys or Arg or Glu or Pro
  misc_feature (1123)..(1123): Val or Arg or Absent or Ile or Lys or Glu or His or Ser or Leu or Met or Phe or Asn or Ala or Gly or Tyr or Gln or Asp or Thr
  misc_feature (1124)..(1124): Lys or Leu or Gln or Absent or Asp or Asn or Glu or Arg or Ala or Ser or Thr or Gly or Met or X
  misc_feature (1125)..(1125): Arg or Asn or Lys or Absent or Ala or Gln or His or Glu or Tyr or Ser or Met or Leu or Cys or Asp or Gly or Phe or Pro or Ile
  misc_feature (1127)..(1127): Gly or Absent or Arg or Lys or Asn or His or Cys or Ala
  misc_feature (1129)..(1129): Lys or Asn or Thr or Absent or Ala or Ser or Val or Glu or Arg or Ile or Gln or Gly or Pro or Asp or Leu or Phe or Cys
  misc_feature (1130)..(1130): Arg or Ala or Lys or Glu or Thr or Absent or Ser or Tyr or Gln or Met or Asp or Gly or Asn or His or Leu or Val
  misc_feature (1132)..(1132): Ile or Val or Tyr or Absent or Arg or Leu or Phe or Asn or Thr or His or Ala or Ser or Cys or Met or Glu or Trp
  misc_feature (1134)..(1134): Ile or Val or Met or Absent or Leu or Phe or Ala or Gly or Cys or Ser or Thr or Trp or Tyr
  misc_feature (1135)..(1135): Gly or Ala or Absent or Thr or Val or Ile or Leu or Cys or Phe or Ser
  misc_feature (1138)..(1138): Gly or Absent or Leu or Cys or Pro or Ala or Ser
  misc_feature (1139)..(1139): Ile or Val or Leu or Absent or Pro or Phe or Met or X
  misc_feature (1140)..(1140): Phe or Absent or Tyr or Leu or Met or X
  misc_feature (1142)..(1142): Asn or Asp or Gly or Glu or Absent or Ser or Gln or Arg or Leu or Lys or Thr or Pro or His or Tyr or Val or Ala
  misc_feature (1143)..(1143): Lys or Asp or Asn or Ser or Absent or Tyr or Gln or Thr or Pro or Gly or Arg or Glu or Ala or Met or Val or Phe
  misc_feature (1144)..(1144): Cys or Ser or Absent or Ala or Thr or Asp or Glu or Gly or Arg or Asn or Pro
  misc_feature (1145)..(1145): Absent or Asn or Tyr or Arg or Ile or Val or Lys or Leu or Pro or Glu
  misc_feature (1146)..(1146): Absent or Asn or Glu or Lys or Gln or Ala or Asp or His
  misc_feature (1147)..(1147): Absent or Ala
  misc_feature (1148)..(1148): Absent or Ser
  misc_feature (1149)..(1149): Absent or Leu
  misc_feature (1151)..(1151): Leu or Absent or Arg or Ile or Val or Met or Glu or Ala or Ser or Tyr or Lys or Thr or Pro or Phe or His or Gly or Gln or Cys or Trp
  misc_feature (1152)..(1152): Lys or Glu or Absent or Ala or Asn or Thr or Gln or Pro or Asp or Ile or Leu or Gly or Val or Tyr or Met or Ser or His or Phe
  misc_feature (1153)..(1153): Asp or Gln or Thr or Glu or Absent or Arg or Lys or Leu or Asn or Ala or Val or Ile or Met or Ser or His
  misc_feature (1154)..(1154): Leu or Met or Absent or Glu or Val or Ile or Gln or Tyr or Arg or Thr or Lys or Asn or Phe or Ala or Ser or Cys or X
  misc_feature (1155)..(1155): Gln or Thr or Asn or Glu or Absent or Ala or Gly or Arg or Lys or Ser or Ile or Phe or Leu or Val or Asp or Tyr or Cys or Met
  misc_feature (1156)..(1156): Ser or Ala or Asp or Lys or Glu or Met or Gln or Arg or Absent or Leu or Asn or His or Thr or Gly or Phe or Ile or Val
  misc_feature (1157)..(1157): Cys or Ser or Absent or Leu or Ala or Gly or Glu or Lys or Thr or Asp or Asn or His or Pro or Tyr or Met or Gln or Arg or Val
  misc_feature (1158)..(1158): Glu or Pro or Lys or Asp or Absent or Ala or Ser or Leu or Asn or Val or Gly or Arg or Thr or Gln or Met
  misc_feature (1159)..(1159): Tyr or Cys or Ala or Val or Asp or Ser or Absent or Lys or Glu or Gly or Pro or Arg or Thr or Asn or Leu or Phe or His or Ile or Gln or Met
  misc_feature (1160)..(1160): Ile or Val or Absent or Leu or Phe or Met or Ser or Glu or Ala or Thr
  misc_feature (1161)..(1161): Glu or Asp or His or Tyr or Asn or Absent or Lys or Leu or Ala or Ser or Thr or Arg or Val or Cys or Ile or Gln
  misc_feature (1162)..(1162): Gln or Ser or Lys or Thr or Tyr or Arg or Absent or Ala or Gly or Asp or Glu or Ile or His or Phe or Val or Cys or Asn or Met
  misc_feature (1163)..(1163): Ile or Val or Absent or Leu or Met or Tyr or Phe or Asp or Asn or Ser
  misc_feature (1164)..(1164): Val or Ile or Absent or Leu or Phe or Ala or Ser or Trp or Thr or Cys or Tyr or Met or Arg
  misc_feature (1165)..(1165): Val or Ile or Absent or Thr or Cys or Ser or Tyr or Ala or Gly or Met or Phe or Leu or Asn or Pro
  misc_feature (1167)..(1167): Asn or Asp or Absent or Val or Ile or Leu or Gly or His or Arg
  misc_feature (1168)..(1168): Thr or Ser or Absent or Ile or Pro or Asn or Cys or Lys or His
  misc_feature (1169)..(1169): Tyr or Phe or Absent or Val or Ile or Ala or Thr or Leu or Met or Gly or Ser or Asp or Cys or Trp
  misc_feature (1170)..(1170): Pro or Absent or Ala or Asp or Ser or Thr or Ile or Glu or Lys or Asn or His or Cys or Phe or Arg or Gln or Leu or Val or Gly or Met or Tyr
  misc_feature (1171)..(1171): Ile or Absent or Gln or Asn or Val or Leu or His or Phe or Pro or Thr or Ser or Arg or Lys or Asp or Glu or Ala or Met or Tyr
  misc_feature (1172)..(1172): Lys or Pro or Ser or Gly or Asn or Asp or Arg or Absent or Glu or Thr or His or Ala or Gln or Phe or Trp or Val or Tyr or Ile or Leu or X
  misc_feature (1173)..(1173): Pro or Val or Lys or Asn or Gly or Glu or Arg or Absent or Gln or Asp or His or Ser or Thr or Leu or Phe or Tyr or Ala or Cys or Ile
  misc_feature (1174)..(1174): Gln or Glu or Asp or Absent or Thr or His or Asn or Lys or Arg or Leu or Tyr or Phe or Cys or Val or Gly or Ser or Ala or Pro or Ile
  misc_feature (1175)..(1175): Absent or Leu or His or Thr or Asp or Pro or Lys or Ile or Ala or Cys or Arg or Gln or Gly or Glu or Phe or Ser or Val or Met or Tyr or Asn
  misc_feature (1176)..(1176): Absent or Glu or Asn or Asp or Gly or Ala or Pro or Lys or Val or Arg or Gln or Leu or His or Ser or Met or Ile or Cys or Thr or Tyr or Trp or Phe
  misc_feature (1177)..(1177): Absent or Ala or Thr or Asp or Gly or Glu or Arg or Trp or Tyr or Phe or Ile or Leu or Val or Lys or Asn or Gln or Ser or His or Met or Pro
  misc_feature (1178)..(1178): Absent or Phe or Glu or Gln or Arg or Ala or Ile or Val or Pro or Ser or Thr or Asp or Lys or Leu or Met or Cys or Asn or Gly
  misc_feature (1179)..(1179): Absent or Gly or Leu or Ala or Val or Ser or Thr or Lys or Gln or Arg or Asn or His or Glu or Pro or Cys or Asp or Met
  misc_feature (1180)..(1180): Absent or Ala or Lys or Ser or Ile or Glu or Gln or Gly or Cys or Leu or Val or Met or Pro or Asn or Phe or Thr or Tyr or His or Arg
  misc_feature (1181)..(1181): Absent or Ala or Gln or His or Asn or Ser or Glu or Asp or Phe or Leu or Ile or Pro or Gly or Val or Lys
  misc_feature (1182)..(1182): Absent or Arg or Lys or Gln or Gly or Asn or Cys or Ser
  misc_feature (1183)..(1183): Absent or Ala or Glu or Gln or Pro
  misc_feature (1184)..(1184): Absent or Gly
  misc_feature (1185)..(1185): Absent or Gly
  misc_feature (1186)..(1186): Absent or Thr
  misc_feature (1187)..(1187): Absent or Lys
  misc_feature (1188)..(1188): Absent or Glu
  misc_feature (1189)..(1189): Absent or Met
  misc_feature (1190)..(1190): Absent or Pro
  misc_feature (1191)..(1191): Absent or Asp
  misc_feature (1192)..(1192): Absent or Lys
  misc_feature (1193)..(1193): Absent or Asn
  misc_feature (1194)..(1194): Absent or Lys
  misc_feature (1195)..(1195): Absent or Asn
  misc_feature (1196)..(1196): Absent or Asp
  misc_feature (1197)..(1197): Absent or Val
  misc_feature (1198)..(1198): Ala or Arg or Gln or Val or Lys or Absent or Ile or Leu or Asp or Glu
  misc_feature (1199)..(1199): Val or Arg or Ile or Met or Ala or Absent or Lys or Gln or Ser or Glu or Gly or Pro or His or Cys or Leu or Thr
  misc_feature (1200)..(1200): Leu or Ile or Glu or Gln or Ala or Arg or Lys or Absent or Val or Tyr or Thr or His or Ser or Asp or Pro
  misc_feature (1201)..(1201): Glu or Ala or Lys or Gly or Arg or Ser or Absent or Leu or Pro or Val or Ile or Gln or Asn or Asp
  misc_feature (1202)..(1202): Cys or Ala or His or Asn or Ser or Met or Ile or Absent or Gly or Val or Leu or Arg
  misc_feature (1203)..(1203): Absent or Lys or Ala or Cys or Glu or Asn or Thr or Pro or Asp or Leu or Ser
  misc_feature (1204)..(1204): Asp or Thr or Glu or Lys or Gln or Arg or Ser or Absent or Gly or Pro
  misc_feature (1205)..(1205): Lys or Absent or Arg or Cys or Leu or Ile or Trp
  misc_feature (1206)..(1206): Leu or Absent or Val or Phe or Met or Ile or Tyr or Ala or His or Thr
  misc_feature (1207)..(1207): Thr or Val or Ser or Ile or Absent or Asp or Glu or Gln or His or Gly or Ala or Arg or Lys or Tyr or Leu or Cys or Asn
  misc_feature (1208)..(1208): Val or Thr or Ile or Absent or Glu or Cys or Met or Gln or Ala or Lys or Arg or Asp or Leu or Ser or Pro or Tyr or Phe
  misc_feature (1209)..(1209): Ile or Leu or Absent or Met or Val or Thr or Ala or Cys or Arg or Tyr or Lys
  misc_feature (1210)..(1210): Asp or Absent or Ser or Glu or Asn or Thr or Ile or Pro or Gly or Lys
  misc_feature (1211)..(1211): Ile or Val or Thr or Leu or Absent or Ala or Ser or Cys or Met
  misc_feature (1212)..(1212): Ser or Absent or Ala or Gly or Val or Ile or Asp or Lys or Glu or Thr or Arg
  misc_feature (1213)..(1213): Gly or Ala or Pro or Ser or His or Phe or Absent or Arg or Asn or Cys or Lys or Gln or Met or Glu or Asp or Thr
  misc_feature (1214)..(1214): Val or Ile or Leu or Absent or Thr or Phe or Arg or Pro or Asp or Glu or Met or Ala or Ser or Tyr
  misc_feature (1215)..(1215): Leu or Phe or Absent or Ile or Val or Tyr or Met or Arg
  misc_feature (1216)..(1216): Ala or Ser or Absent or Gly or Lys or Met or Thr or Glu
  misc_feature (1218)..(1218): Ala or Cys or Ser or Absent or Thr or Val or Gly or His or Lys or Tyr or Phe or Met or Ile or Arg
  misc_feature (1220)..(1220): Arg or Absent or Lys or Thr or Ala or Phe or Gln or Asp or Glu or Ser or Leu or Cys or His or Asn or Gly or Met or Tyr or Trp or Ile or Pro or Val
  misc_feature (1222)..(1222): Absent or Leu or Ile or Val or Thr or Tyr or Lys or Ser or Gly
  misc_feature (1223)..(1223): Absent or His or Tyr or Ser or Ile or Lys or Leu or X
  misc_feature (1224)..(1224): Thr or Asn or Asp or His or Absent or Ile or Val or Ser or Leu or Glu or Lys or Arg or Gly or Ala or Phe or Met or Cys or Tyr or Gln
  misc_feature (1225)..(1225): His or Absent or Asn or Val or Lys or Arg or Glu or Gly or Ala or Leu or Phe or Ser or Tyr or Ile or Gln or Thr or Met or Cys or Trp
  misc_feature (1226)..(1226): Asn or His or Phe or Tyr or Absent or Leu or Gln or Val or Thr or Gly or Arg or Ser or Glu or Asp or Ala or Lys or Ile or Met
  misc_feature (1227)..(1227): Gly or Absent or Ser or Asp or Phe or Asn or Glu or His or Lys or Leu or Trp or Ala or Gln or Arg or Met
  misc_feature (1228)..(1228): Glu or Absent or Leu or Val or Asp or Gly or Gln or Arg or Asn or Ser or His or Thr or Lys or Ala or Met or Ile or Cys or X
  misc_feature (1229)..(1229): Ser or Ala or Absent or Gln or Val or Thr or Gly or Lys or Asn or Phe or Pro or Arg
  misc_feature (1230)..(1230): Absent or Ser or Lys or Ala or Glu or Asp or Gly or Val
  misc_feature (1231)..(1231): Absent or Leu or Ile or Gly or Asp or Ser or Ala
  misc_feature (1232)..(1232): Absent or Leu or Asn or Arg or Phe or Ile or His or Lys
  misc_feature (1233)..(1233): Absent or Asp or Glu or Arg or Gly or Asn or Thr or Gln or Ser or Pro or Ala or Lys
  misc_feature (1234)..(1234): Absent or Asn or Asp or Arg or Val or Leu or Gly or Ile or Thr or Ser or Pro
  misc_feature (1235)..(1235): Ile or Asp or Leu or Absent or Val or Arg or Lys or Ser or Thr or Pro or Met or Tyr or X or Phe
  misc_feature (1237)..(1237): Phe or Ala or Val or Ser or Pro or Absent or Met or Ile or Gln or Leu or Tyr or Lys or His or Asp or Glu or Thr or Gly or Arg or Asn or Cys
  misc_feature (1238)..(1238): Leu or Val or Absent or Ile or Met or Phe or Asn or Ala or Gln or Lys or Arg or Thr or Ser
  misc_feature (1240)..(1240): Lys or Glu or Asp or Asn or Gln or Absent or Arg or Gly or Ser or His or Thr or Ala or Met or Phe or Val or Ile or Leu or Tyr or Pro
  misc_feature (1241)..(1241): Lys or Gln or Ser or Leu or His or Absent or Tyr or Asp or Pro or Glu or Asn or Val or Gly or Cys or Thr or Ala or Ile or Arg or Phe or Met
  misc_feature (1242)..(1242): Ala or Met or Leu or His or Arg or Ile or Tyr or Absent or Val or Gly or Asn or Asp or Glu or Ser or Trp or Thr or Gln or Cys or Lys or Phe or Pro
  misc_feature (1243)..(1243): Phe or Thr or Ser or Ala or Asp or Val or Gly or Absent or Trp or Gln or Pro or Lys or His or Asn or Glu or Arg or Leu or Ile or Tyr
  misc_feature (1244)..(1244): Absent or Met or Ser or Ala or Thr or Tyr or Asp or Val or Glu or Ile or Pro or Leu or Cys or Asn or Lys or Gln or Phe or Gly or Arg or His
  misc_feature (1245)..(1245): Absent or Ile or Leu or Glu or Trp or Phe or Thr or Asp or Ser or Ala or Lys or Arg or Gly or His or Gln or Val or Met or Asn
  misc_feature (1246)..(1246): Absent or Glu or Gly or Val or Met or Ile or Thr or Asn or Leu or Phe or His or Lys or Arg or Pro or Gln or Asp or Ala or Ser
  misc_feature (1247)..(1247): Absent or Arg or Phe or Gly or Ala or Ser or Asp or Lys or Trp or Leu or Gln or Thr or Val or Ile or Met or Glu or Asn
  misc_feature (1248)..(1248): Absent or Val or Gln or Asn or Pro or Lys or Asp or Ser or Leu or Ala or Cys or Gly or Arg or Glu or Ile or Met or Tyr or His or Thr
  misc_feature (1249)..(1249): Absent or Gln or Pro or Gly or Ala or Arg or Ile or Lys or Phe or Thr or Cys or Leu or Glu or Asp or Asn
  misc_feature (1250)..(1250): Absent or Thr or Tyr or Ala or Gly or Asn or Phe or Ile or Val or Lys or Cys or Leu or Ser or Asp or Glu
  misc_feature (1251)..(1251): Absent or Ile or Arg or Thr or Leu or Glu or Gln or Phe or His or Pro or Met or Lys or Ala
  misc_feature (1252)..(1252): Absent or His or Pro or Tyr or Phe or Lys or Cys or Glu or Asp or Asn or Ser or Arg
  misc_feature (1253)..(1253): Absent or Glu or Lys or Arg or Ala or Ile or Phe or His or Ser or Gln or Asn or Asp or Met
  misc_feature (1254)..(1254): Absent or His or Lys or Ala or Val or Met or Ile or Gly or Arg or Ser or Tyr
  misc_feature (1255)..(1255): Absent or Asp or Lys or Asn or Tyr or Leu or Gly or Ser or Gln or Ile
  misc_feature (1256)..(1256): Absent or Asp or Lys or Asn or His or Ser or Pro or Val
  misc_feature (1257)..(1257): Absent or Glu or Phe or Asn or Lys or Gly
  misc_feature (1258)..(1258): Absent or Ile or Lys or Asn or Tyr or Glu
  misc_feature (1259)..(1259): Absent or Thr or Lys or Glu or Asn or Cys
  misc_feature (1260)..(1260): Absent or Ala or Gln or Val
  misc_feature (1261)..(1261): Absent or Ala or Pro or Asn
  misc_feature (1262)..(1262): Absent or Ala or Arg or Cys
  misc_feature (1263)..(1263): Absent or Ala or Gly or Met
  misc_feature (1264)..(1264): Absent or Val or His
  misc_feature (1265)..(1265): Absent or Ala or Met
  misc_feature (1266)..(1266): Absent or Arg or Thr
  misc_feature (1267)..(1267): Absent or Thr or Leu
  misc_feature (1268)..(1268): Absent or Asp or Leu
  misc_feature (1269)..(1269): Absent or Ala or Pro
  misc_feature (1270)..(1270): Absent or Thr
  misc_feature (1271)..(1271): Absent or Val or Thr
  misc_feature (1272)..(1272): Absent or Ala or Lys
  misc_feature (1273)..(1273): Absent or Ala or Glu
  misc_feature (1274)..(1274): Absent or Ser or Ala
  misc_feature (1275)..(1275): Absent or Thr or Ser
  misc_feature (1276)..(1276): Absent or Arg or Asp
  misc_feature (1277)..(1277): Absent or Thr or Ala
  misc_feature (1278)..(1278): Absent or Ser or Pro
  misc_feature (1279)..(1279): Absent or Arg or Thr
  misc_feature (1280)..(1280): Absent or Pro or Tyr
  misc_feature (1281)..(1281): Absent or Gln or Gly
  misc_feature (1282)..(1282): Absent or Ser or Gly
  misc_feature (1283)..(1283): Absent or Arg or Val
  misc_feature (1284)..(1284): Absent or Ala or Val
  misc_feature (1285)..(1285): Absent or Ile
  misc_feature (1286)..(1286): Absent or Ser or Leu
  misc_feature (1287)..(1287): Absent or Pro or Ala
  misc_feature (1288)..(1288): Absent or Ser
  misc_feature (1289)..(1289): Absent or His or Glu
  misc_feature (1290)..(1290): Absent or Ser or Ala
  misc_feature (1291)..(1291): Absent or Lys or Gln
  misc_feature (1292)..(1292): Absent or Leu
  misc_feature (1293)..(1293): Absent or Phe
  misc_feature (1294)..(1294): Absent or Pro
  misc_feature (1295)..(1295): Absent or Pro
  misc_feature (1296)..(1296): Absent or Ser
  misc_feature (1297)..(1297): Absent or Pro
  misc_feature (1298)..(1298): Absent or Tyr
  misc_feature (1299)..(1299): Absent or Thr
  misc_feature (1300)..(1300): Absent or Leu
  misc_feature (1301)..(1301): Absent or Pro
  misc_feature (1302)..(1302): Absent or Asp
  misc_feature (1303)..(1303): Absent or Pro
  misc_feature (1304)..(1304): Absent or Pro
  misc_feature (1305)..(1305): Absent or Val
  misc_feature (1306)..(1306): Absent or Ala
  misc_feature (1307)..(1307): Absent or Ala
  misc_feature (1308)..(1308): Absent or Asn
  misc_feature (1309)..(1309): Absent or Tyr
  misc_feature (1310)..(1310): Absent or Phe
  misc_feature (1311)..(1311): Absent or Ala
  misc_feature (1312)..(1312): Absent or His
  misc_feature (1313)..(1313): Absent or His
  misc_feature (1314)..(1314): Absent or Pro
  misc_feature (1315)..(1315): Absent or Thr
  misc_feature (1316)..(1316): Absent or Thr
  misc_feature (1317)..(1317): Absent or Pro
  misc_feature (1318)..(1318): Absent or Ser
  misc_feature (1319)..(1319): Absent or Pro
  misc_feature (1320)..(1320): Absent or Thr
  misc_feature (1321)..(1321): Absent or Ser
  misc_feature (1322)..(1322): Absent or Thr
  misc_feature (1323)..(1323): Absent or Ala
  misc_feature (1324)..(1324): Absent or His
  misc_feature (1325)..(1325): Absent or Pro
  misc_feature (1326)..(1326): Absent or Ala
  misc_feature (1327)..(1327): Absent or Leu
  misc_feature (1328)..(1328): Absent or Asp
  misc_feature (1329)..(1329): Absent or Thr
  misc_feature (1330)..(1330): Absent or Pro
  misc_feature (1331)..(1331): Absent or Lys
  misc_feature (1332)..(1332): Absent or Ala
  misc_feature (1333)..(1333): Absent or Ser
  misc_feature (1334)..(1334): Absent or Asp
  misc_feature (1335)..(1335): Absent or Pro
  misc_feature (1336)..(1336): Absent or Lys
  misc_feature (1337)..(1337): Absent or Tyr
  misc_feature (1338)..(1338): Absent or Ala
  misc_feature (1339)..(1339): Absent or Pro
  misc_feature (1340)..(1340): Absent or Ser
  misc_feature (1341)..(1341): Absent or Pro
  misc_feature (1342)..(1342): Absent or Leu
  misc_feature (1343)..(1343): Absent or Ser
  misc_feature (1344)..(1344): Absent or Arg
  misc_feature (1345)..(1345): Absent or Asn
  misc_feature (1346)..(1346): Absent or Val
  unsure (1)..(1346): unsure at all Xaa locations
XXXXXXXXXXXXXXXXXXXXXXXXXXXXXXXXXXXXXXXXXXXXXXXXXXXXXXXXXXXXXXXXXXXXXXXXXXXXXXXXXXXXXXXXXXXXXXXXXXXXXXXXXXXXXXXXXXXXXXXXXXXXXXXXXXXXXXXXXXXXXXXXXXXXXXXXXXXXXXXXXXXXXXXXXXXXXXXXXXXXXXXXXXXXXXXXXXXXXXXXXXXXXXXXXXXXXXXXXXXXXXXXXXXXXXXXXXXXXXXXXXXXXXXXXXXXXXXXXXXXXXXXXXXXXXXXXXXXXXXXXXXXXXXXXXXXXXXXXXXXXXXFXGXXXXXLAXXXXXXLXXXXXXXXXXXXXXXXXXXXXXXXXXXXXXXXXXXXXXXXXXXXXXXXXXXXXXXXXXXXXXXFXDGEXXXXXXEXXXXXRGXDVXXXQXXXXPXXXXXXXXXXXXXXXXXXXXXXXXXXXXXXXNXXLMELLXMXDAXXRASAXXXXITXVXPYXGYARQDRXXXXXXXXXXXXXXXXXXXXXXXXXXXXXXXXXXXXXXXXXXXXXXXXXXXXXXXXXXXXXXXXXXXXXXXXXXXXXXXXXXXXXXXXXXXXXXXXXXXXXXXXXXXXXXXXXXXXXXXXXXXXXXXXXXXXXXXXXXXXXXXXXXXXXXXXXXXRXXIXAKXXAXXXXXXGXXRXXXXDLHXXQXQGFFDXXXPVDXXXXXXXXXXXXXXXXXXXXXXXXXXXXXXXXXXXXXXXXVVSPDXGGVXRARXXAXXLXXXXXXXXXXXXAIXDKRRXXXXXXXXXXXXXXXXXXXXXXXXXXXXXXXXXXXXXXXXXXXXXXXXXXXXXXXXXXXXXXXXXXXXXXXXXXXXXXXXXXXXXXXXXXXXXXXXXXXXXXXXXXXXXXXXXXXXXXXXXXXXXXXXXXXXXXXXXXXXXXXXXXXXXXXXXXXXXXXXXXXXXXXXXXXXXXXXXXXXXXXXXXXXXXXXXXXXXXXXXXXXXXXXXXXXXXXXXXXXXXXXXXXXXXXXXXXXXXXXXXXXXXXXXXXXXXXXXXXXXXXXXXXXXXXXXXXXXXXXXXXXGXXVXXXXXXXXXXXXXXXXXXXXXXXXXXXXXXXXXXXXGXXXXXXDDXXDTXXXXXXXXXXXXXXXXXGTXXXAAXXLXXXGXAXXVXAXXTHXXXSXXXXXXXXAXXXXXXXXXXXXXXXTXXXXXXXXXXXXXXXXXXXXXXXXXXXXXXXXXXXXXXXXXXXXXXXXXXEXIXRXXXXXXXXXXXXXXSXXFXXXXXXXXXXXXXXXXXXXXXXXXXXXXXXXXXXXXXXXXXXXXXXXXXXXXXXXXXXXXXXXXXXXXXXXXXXXXXXXXXXXXXXXXXXXXXXXXXXXXXXXXXXX

SEQ ID NO: 36451 - protein, 366 aa, Artificial sequence
  consensus sequence of seq id no: 344 and its homologs
  misc_feature (1)..(1): Absent or Gln
  misc_feature (2)..(2): Absent or Pro
  misc_feature (3)..(3): Absent or Pro
  misc_feature (4)..(4): Absent or Gly
  misc_feature (5)..(5): Absent or Ala
  misc_feature (6)..(6): Absent or Asp
  misc_feature (7)..(7): Absent or Cys
  misc_feature (8)..(8): Absent or Met
  misc_feature (9)..(9): Absent or Phe
  misc_feature (10)..(10): Absent or Ser
  misc_feature (11)..(11): Absent or Ala
  misc_feature (12)..(12): Absent or Met
  misc_feature (13)..(13): Absent or Leu
  misc_feature (14)..(14): Ser or Absent or Gly
  misc_feature (15)..(15): Val or Absent or Leu
  misc_feature (16)..(16): Leu or Absent or Cys
  misc_feature (17)..(17): Pro or Absent or Thr
  misc_feature (18)..(18): Trp or Absent or Leu
  misc_feature (19)..(19): Glu or Absent or Arg
  misc_feature (20)..(20): Ala or Absent or Met
  misc_feature (21)..(21): Cys or Absent or Trp
  misc_feature (22)..(22): Arg or Absent or Thr
  misc_feature (23)..(23): Ser or Absent or Met
  misc_feature (24)..(24): Ser or Absent or Pro
  misc_feature (25)..(25): Asp or Absent or Thr
  misc_feature (26)..(26): His or Absent or Ala
  misc_feature (27)..(27): Ile or Absent or Leu
  misc_feature (28)..(28): Phe or Absent
  misc_feature (29)..(29): Leu or Absent or Ser
  misc_feature (30)..(30): Arg or Absent or Ser
  misc_feature (31)..(31): Absent or Tyr
  misc_feature (32)..(32): Absent or Ser
  misc_feature (33)..(33): Absent or Phe
  misc_feature (34)..(34): Absent or Ala
  misc_feature (35)..(35): Val or Absent or Leu
  misc_feature (36)..(36): Phe or Leu or Tyr
  misc_feature (37)..(37): Glu or Ser or Met
  misc_feature (38)..(38): Ser or Leu or Cys
  misc_feature (39)..(39): Glu or Arg or Ala
  misc_feature (40)..(40): Thr or Ser
  misc_feature (41)..(41): Gly or Cys or Thr
  misc_feature (42)..(42): Phe or Met or Leu
  misc_feature (43)..(43): Arg or Ile or Met
  misc_feature (44)..(44): Arg or Lys or Gly
  misc_feature (45)..(45): Gly or Val or Ser
  misc_feature (46)..(46): Val or Leu
  misc_feature (47)..(47): Ser or Phe
  misc_feature (48)..(48): Ser or Leu or Val
  misc_feature (49)..(49): Trp or Tyr or Ser
  misc_feature (50)..(50): Glu or Val
  misc_feature (51)..(51): Pro or Ser or Arg
  misc_feature (52)..(52): Tyr or Ser or His
  misc_feature (53)..(53): Glu or Pro
  misc_feature (54)..(54): Tyr or Ser
  misc_feature (55)..(55): His or Val or Ala
  misc_feature (56)..(56): Met or Ser or Thr
  misc_feature (57)..(57): Ala or Asn or Glu
  misc_feature (58)..(58): Glu or Gln
  misc_feature (59)..(59): Val or Ile or Ser
  misc_feature (60)..(60): Glu or Ala or Pro
  misc_feature (61)..(61): Ala or Ser or Gln
  misc_feature (62)..(62): Gln or Ser
  misc_feature (63)..(63): Gly or Asn or Ser
  misc_feature (64)..(64): Absent or Ser
  misc_feature (65)..(65): Absent or Thr
  misc_feature (66)..(66): Absent or Gln
  misc_feature (67)..(67): Absent or Pro
  misc_feature (68)..(68): Absent or Lys
  misc_feature (69)..(69): Absent or Ser
  misc_feature (70)..(70): Absent or Leu
  misc_feature (71)..(71): Absent or Ser
  misc_feature (72)..(72): Absent or Ser
  misc_feature (73)..(73): Absent or Trp
  misc_feature (74)..(74): Absent or Met
  misc_feature (75)..(75): Absent or Phe
  misc_feature (76)..(76): Absent or Leu
  misc_feature (77)..(77): Absent or Lys
  misc_feature (78)..(78): Absent or Ala
  misc_feature (79)..(79): Absent or Ser
  misc_feature (80)..(80): Leu or Absent or Thr
  misc_feature (81)..(81): Val or Ala
  misc_feature (82)..(82): Ser or Cys
  misc_feature (83)..(83): Ile or Leu or Val
  misc_feature (84)..(84): Arg or Ala
  misc_feature (85)..(85): Arg or Leu
  misc_feature (86)..(86): Glu or Leu or Ser
  misc_feature (87)..(87): Arg or Gln or Leu
  misc_feature (88)..(88): Arg or Ala
  misc_feature (89)..(89): Arg or Leu or Ser
  misc_feature (90)..(90): Phe or Ser or Leu
  misc_feature (91)..(91): Cys or Gly
  misc_feature (92)..(92): Gly or Glu or Ser
  misc_feature (93)..(93): Leu or Phe or Pro
  misc_feature (94)..(94): Arg or Met
  misc_feature (95)..(95): Leu or Ile or Thr
  misc_feature (96)..(96): Arg or Ser
  misc_feature (97)..(97): Arg or Lys or Ile
  misc_feature (98)..(98): Asp or Absent or Arg
  misc_feature (99)..(99): Arg or Absent
  misc_feature (100)..(100): Leu or Absent or Ser
  misc_feature (101)..(101): Lys or Thr
  misc_feature (102)..(102): Gln or Glu or Asp
  misc_feature (103)..(103): Gly or Lys or Ser
  misc_feature (104)..(104): Pro or Leu or Ala
  misc_feature (105)..(105): Arg or Ser or Gly
  misc_feature (106)..(106): Leu or Ala or Ser
  misc_feature (107)..(107): Ser or Cys
  misc_feature (108)..(108): Pro or Arg
  misc_feature (109)..(109): Trp or Ser
  misc_feature (110)..(110): Trp or Leu
  misc_feature (111)..(111): Thr or Met
  misc_feature (112)..(112): Ala or Gly or Arg
  misc_feature (113)..(113): Ala or Val or Leu
  misc_feature (114)..(114): Ser or Asp or Pro
  misc_feature (115)..(115): Arg or Ala or Thr
  misc_feature (116)..(116): Ser or Pro
  misc_feature (117)..(117): Arg or Ser or Pro
  misc_feature (118)..(118): Ala or Ser
  misc_feature (119)..(119): Trp or Asn or Thr
  misc_feature (120)..(120): Arg or Absent or Pro
  misc_feature (121)..(121): Lys or Absent or Ala
  misc_feature (122)..(122): Met or Absent or Ser
  misc_feature (123)..(123): Ala or Absent or Phe
  misc_feature (124)..(124): Met or Absent or Ile
  misc_feature (125)..(125): Arg or Absent
  misc_feature (126)..(126): Absent or Thr
  misc_feature (127)..(127): Absent or Ile
  misc_feature (128)..(128): Absent or Ser
  misc_feature (129)..(129): Absent or Met
  misc_feature (130)..(130): Absent or Met
  misc_feature (131)..(131): Absent or Ile
  misc_feature (132)..(132): Absent or Phe
  misc_feature (133)..(133): Absent or Thr
  misc_feature (134)..(134): Absent or Thr
  misc_feature (135)..(135): Absent or Met
  misc_feature (136)..(136): Absent or Ala
  misc_feature (137)..(137): Absent or Pro
  misc_feature (138)..(138): Absent or Ser
  misc_feature (139)..(139): Absent or Ser
  misc_feature (140)..(140): Absent or Arg
  misc_feature (141)..(141): Absent or Lys
  misc_feature (142)..(142): Absent or Phe
  misc_feature (143)..(143): Absent or Ser
  misc_feature (144)..(144): Absent or Leu
  misc_feature (145)..(145): Absent or Ser
  misc_feature (146)..(146): Absent or Ala
  misc_feature (147)..(147): Absent or Pro
  misc_feature (148)..(148): Absent or Cys
  misc_feature (149)..(149): Absent or Pro
  misc_feature (150)..(150): Trp or Absent or Val
  misc_feature (151)..(151): Arg or Absent or Val
  misc_feature (152)..(152): Arg or Absent or Ser
  misc_feature (153)..(153): Ile or Absent
  misc_feature (154)..(154): Arg or Absent or Ile
  misc_feature (155)..(155): Gly or Absent or Arg
  misc_feature (156)..(156): Ala or Cys
  misc_feature (157)..(157): Arg or Ile or Val
  misc_feature (158)..(158): Pro or Ser
  misc_feature (208)..(208): Absent or Arg
  misc_feature (209)..(209): Absent or Asp
  misc_feature (210)..(210): Absent or Ala
  misc_feature (211)..(211): Absent or Pro
  misc_feature (212)..(212): Absent or Asp
  misc_feature (213)..(213): Absent or Asp
  misc_feature (214)..(214): Absent or Gly
  misc_feature (215)..(215): Absent or Asp
  misc_feature (216)..(216): Absent or Asp
  misc_feature (217)..(217): Absent or Arg
  misc_feature (218)..(218): Absent or Ala
  misc_feature (219)..(219): Absent or Arg
  misc_feature (220)..(220): Absent or Arg
  misc_feature (221)..(221): Absent or Ala
  misc_feature (222)..(222): Absent or Gln
  misc_feature (223)..(223): Absent or Gly
  misc_feature (224)..(224): Absent or Glu
  misc_feature (225)..(225): Absent or Leu
  misc_feature (226)..(226): Absent or Leu
  misc_feature (227)..(227): Absent or Pro
  misc_feature (228)..(228): Absent or Arg
  misc_feature (229)..(229): Absent or Arg
  misc_feature (230)..(230): Absent or Arg
  misc_feature (231)..(231): Absent or Arg
  misc_feature (232)..(232): Absent or Leu
  misc_feature (233)..(233): Absent or His
  misc_feature (234)..(234): Absent or Gly
  misc_feature (235)..(235): Absent or Gly
  misc_feature (236)..(236): Absent or Glu
  misc_feature (237)..(237): Absent or Asp
  misc_feature (238)..(238): Absent or His
  misc_feature (239)..(239): Absent or His
  misc_feature (240)..(240): Absent or Asp
  misc_feature (241)..(241): Arg or Gly
  misc_feature (242)..(242): Pro or Tyr
  misc_feature (243)..(243): Cys or Asp
  misc_feature (244)..(244): Ser or Val or Glu
  misc_feature (245)..(245): Ser or Gly or Ala
  misc_feature (246)..(246): Tyr or Gly
  misc_feature (247)..(247): Ser or Thr or Arg
  misc_feature (248)..(248): Ser or Gly
  misc_feature (249)..(249): Ser or Ile or Gly
  misc_feature (250)..(250): Ser or Tyr or Gly
  misc_feature (251)..(251): Pro or Ser or Arg
  misc_feature (252)..(252): Ser or Gly
  misc_feature (253)..(253): Leu or His or Arg
  misc_feature (254)..(254): His or Lys or Glu
  misc_feature (255)..(255): Arg or Thr or Pro
  misc_feature (256)..(256): His or Trp
  misc_feature (257)..(257): Leu or Thr or Gln
  misc_feature (258)..(258): Pro or Cys or Gly
  misc_feature (259)..(259): Pro or Thr or Ser
  misc_feature (260)..(260): Gly or Leu or Ala
  misc_feature (261)..(261): Ser or Leu or Gly
  misc_feature (262)..(262): Ala or Ser
  misc_feature (263)..(263): Thr or Phe or Arg
  misc_feature (264)..(264): Arg or Leu
  misc_feature (265)..(265): Arg or Leu or Val
  misc_feature (267)..(267): Pro or Asp or Ala
  misc_feature (268)..(268): Pro or Ser
  misc_feature (269)..(269): Arg or Glu or Pro
  misc_feature (270)..(270): Arg or Leu or Asp
  misc_feature (271)..(271): Gln or Ser or Gly
  misc_feature (272)..(272): Pro or Arg
  misc_feature (273)..(273): Trp or Gln or His
  misc_feature (274)..(274): Thr or Ser or Gly
  misc_feature (275)..(275): Leu or Ala
  misc_feature (276)..(276): Leu or Gln
  misc_feature (277)..(277): Pro or Gly
  misc_feature (278)..(278): Ile or Cys
  misc_feature (279)..(279): Ser or Gln
  misc_feature (280)..(280): Ser or Ala or Gly
  misc_feature (281)..(281): Lys or Gly
  misc_feature (282)..(282): Ser or Val or Gly
  misc_feature (283)..(283): Lys or Gly or His
  misc_feature (284)..(284): Thr or Tyr
  misc_feature (285)..(285): Thr or Phe or Cys
  misc_feature (286)..(286): Lys or Ser
  misc_feature (287)..(287): Pro or Absent
  misc_feature (288)..(288): Thr or Val or Arg
  misc_feature (289)..(289): Ser or Gly
  misc_feature (290)..(290): Phe or Tyr
  misc_feature (291)..(291): Ser or Ala or Glu
  misc_feature (292)..(292): Thr or Trp or Leu
  misc_feature (293)..(293): Tyr or Arg or His
  misc_feature (294)..(294): Arg or Absent or Pro
  misc_feature (295)..(295): Asn or Absent or Gly
  misc_feature (296)..(296): Absent or Gly
  misc_feature (297)..(297): Absent or Gln
  misc_feature (298)..(298): Absent or Thr
  misc_feature (299)..(299): Absent or Phe
  misc_feature (300)..(300): Absent or Arg
  misc_feature (301)..(301): Absent or Leu
  misc_feature (302)..(302): Absent or Gly
  misc_feature (303)..(303): Absent or Ala
  misc_feature (304)..(304): Absent or Gly
  misc_feature (305)..(305): Absent or Arg
  misc_feature (306)..(306): Absent or Leu
  misc_feature (307)..(307): Absent or Arg
  misc_feature (308)..(308): Absent or Gly
  misc_feature (309)..(309): Absent or Leu
  misc_feature (310)..(310): Absent or Leu
  misc_feature (311)..(311): Lys or Absent or Ser
  misc_feature (312)..(312): Thr or Absent or Cys
  misc_feature (313)..(313): Leu or Absent or Arg
  misc_feature (314)..(314): Ser or Absent or Gly
  misc_feature (315)..(315): Leu or Absent or Met
  misc_feature (316)..(316): Asn or Absent or Ser
  misc_feature (317)..(317): Leu or Absent or Tyr
  misc_feature (318)..(318): Ser or Gly
  misc_feature (319)..(319): His or Phe
  misc_feature (320)..(320): Val or Ile or Lys
  misc_feature (321)..(321): Ile or Gln
  misc_feature (322)..(322): Phe or Arg or Ser
  misc_feature (323)..(323): Ile or His
  misc_feature (324)..(324): Trp or Leu or Gln
  misc_feature (325)..(325): Phe or Asp or Cys
  misc_feature (326)..(326): Pro or His or Cys
  misc_feature (327)..(327): Arg or Ala or Thr
  misc_feature (328)..(328): Asn or Ala or His
  misc_feature (329)..(329): Pro or Val
  misc_feature (330)..(330): Thr or Glu or Gln
  misc_feature (331)..(331): Ser or Gly
  misc_feature (332)..(332): Glu or Gln or Lys
  misc_feature (333)..(333): Ser or Absent or Thr
  misc_feature (334)..(334): Leu or Absent or Ile
  misc_feature (335)..(335): Ser or Absent or Arg
  misc_feature (336)..(336): Leu or Absent or Arg
  misc_feature (337)..(337): Arg or Absent or Glu
  misc_feature (338)..(338): Leu or Absent or Ser
  misc_feature (339)..(339): Lys or Absent or Glu
  misc_feature (340)..(340): Asp or Absent or Ser
  misc_feature (341)..(341): Ser or Absent
  misc_feature (342)..(342): Gln or Absent or Arg
  misc_feature (343)..(343): Glu or Absent or His
  misc_feature (344)..(344): Asn or Absent or Gly
  misc_feature (345)..(345): Met or Absent or Pro
  misc_feature (346)..(346): Val or Absent or His
  misc_feature (347)..(347): Arg or Absent or Ser
  misc_feature (348)..(348): Ser or Absent
  misc_feature (349)..(349): Ser or Absent or Lys
  misc_feature (350)..(350): Ala or Absent or Cys
  misc_feature (351)..(351): Cys or Absent or Ala
  misc_feature (352)..(352): Phe or Absent or Ser
  misc_feature (353)..(353): Pro or Absent or Gln
  misc_feature (354)..(354): Arg or Absent or His
  misc_feature (355)..(355): Glu or Absent or Ser
  misc_feature (356)..(356): Tyr or Absent or Thr
  misc_feature (357)..(357): Arg or Absent or Lys
  misc_feature (358)..(358): Absent or His
  misc_feature (359)..(359): Absent or Ala
  misc_feature (360)..(360): Absent or Val
  misc_feature (361)..(361): Absent or Leu
  misc_feature (362)..(362): Absent or Cys
  misc_feature (363)..(363): Absent or Ser
  misc_feature (364)..(364): Absent or Trp
  misc_feature (365)..(365): Absent or Trp
  misc_feature (366)..(366): Absent or Leu
  unsure (1)..(366): unsure at all Xaa locations
XXXXXXXXXXXXXXXXXXXXXXXXXXXXXXXXXXXXXXXXXXXXXXXXXXXXXXXXXXXXXXXXXXXXXXXXXXXXXXXXXXXXXXXXXXXXXXXXXXXXXXXXXXXXXXXXXXXXXXXXXXXXXXXXXXXXXXXXXXXXXXXXXXXXXXXXXXXXXXKYCDRVNALSRYLLPHITNNINTHHSRRHPLDHYSHTTDLLIHAAACRSXXXXXXXXXXXXXXXXXXXXXXXXXXXXXXXXXXXXXXXXXXXXXXXXXXXXXXXXXXRXXXXXXXXXXXXXXXXXXXXXXXXXXXXXXXXXXXXXXXXXXXXXXXXXXXXXXXXXXXXXXXXXXXXXXXXXXXXXXXXXXXXXXXXXXXXXXXXXXXX

SEQ ID NO: 36452 - protein, 354 aa, Artificial sequence
  Consensus sequence of seq id no: 346 and its homologs
  misc_feature (1)..(1): Absent or Thr
  misc_feature (2)..(2): Absent or Cys
  misc_feature (3)..(3): Absent or Gly
  misc_feature (4)..(4): Absent or Leu
  misc_feature (5)..(5): Absent or Gly
  misc_feature (6)..(6): Absent or Arg
  misc_feature (7)..(7): Absent or Glu
  misc_feature (8)..(8): Absent or Thr
  misc_feature (9)..(9): Absent or Pro
  misc_feature (10)..(10): Absent or Glu
  misc_feature (11)..(11): Absent or Gly
  misc_feature (12)..(12): Absent or Arg or Gly
  misc_feature (13)..(13): Absent or Arg
  misc_feature (14)..(14): Absent or Pro
  misc_feature (15)..(15): Absent or Ser
  misc_feature (16)..(16): Absent or Cys or Pro
  misc_feature (17)..(17): Absent or Cys or Ser
  misc_feature (18)..(18): Absent or Arg or Leu
  misc_feature (19)..(19): Absent or Cys or Arg
  misc_feature (20)..(20): Absent or Gly
  misc_feature (21)..(21): Absent or Thr or Asp
  misc_feature (22)..(22): Absent or Gly
  misc_feature (23)..(23): Absent or Pro or Leu
  misc_feature (24)..(24): Absent or Ser or Cys
  misc_feature (25)..(25): Absent or His or Ala
  misc_feature (26)..(26): Absent or Pro or Ala
  misc_feature (27)..(27): Absent or Thr or Ala
  misc_feature (28)..(28): Absent or Gly or Ala
  misc_feature (29)..(29): Absent or Cys or His
  misc_feature (30)..(30): Absent or Ser
  misc_feature (31)..(31): Absent or Ser or Phe
  misc_feature (32)..(32): Absent or Cys or Leu
  misc_feature (33)..(33): Absent or Ala or Pro
  misc_feature (34)..(34): Absent or Pro or Ser
  misc_feature (35)..(35): Absent or Ser
  misc_feature (36)..(36): Absent or Gly or Val
  misc_feature (37)..(37): Absent or Arg or Ser
  misc_feature (38)..(38): Absent or Arg or Glu
  misc_feature (39)..(39): Absent or Arg or His
  misc_feature (40)..(40): Absent or Arg
  misc_feature (41)..(41): Absent or Gly or Asp
  misc_feature (42)..(42): Absent or Gly
  misc_feature (43)..(43): Absent or Thr or Val
  misc_feature (44)..(44): Absent or Arg or Glu
  misc_feature (45)..(45): Absent or Ala or Met
  misc_feature (46)..(46): Absent or Ser or Glu
  misc_feature (47)..(47): Absent or Glu
  misc_feature (48)..(48): Absent or Gln
  misc_feature (49)..(49): Absent or Glu
  misc_feature (50)..(50): Absent or Ala
  misc_feature (51)..(51): Absent or Ser or Pro
  misc_feature (52)..(52): Absent or Trp
  misc_feature (53)..(53): Absent or Ser or Arg
  misc_feature (54)..(54): Absent or Ser
  misc_feature (55)..(55): Absent or Pro
  misc_feature (56)..(56): Absent or Cys
  misc_feature (57)..(57): Absent or Pro
  misc_feature (58)..(58): Absent or Gln
  misc_feature (59)..(59): Absent or Val
  misc_feature (60)..(60): Absent or Pro
  misc_feature (61)..(61): Absent or Gly
  misc_feature (62)..(62): Absent or Asn
  misc_feature (63)..(63): Absent or Cys
  misc_feature (64)..(64): Absent or Ser
  misc_feature (65)..(65): Absent or Ser
  misc_feature (66)..(66): Absent or Leu
  misc_feature (67)..(67): Absent or Glu
  misc_feature (68)..(68): Absent or Lys
  misc_feature (69)..(69): Absent or Glu
  misc_feature (70)..(70): Absent or Val
  misc_feature (71)..(71): Absent or Ala
  misc_feature (72)..(72): Absent or Gln
  misc_feature (73)..(73): Absent or Thr
  misc_feature (74)..(74): Absent or Leu
  misc_feature (75)..(75): Absent or Pro
  misc_feature (76)..(76): Absent or Arg
  misc_feature (77)..(77): Absent or Ser
  misc_feature (78)..(78): Absent or Gln
  misc_feature (79)..(79): Absent or His
  misc_feature (80)..(80): Absent or Phe
  misc_feature (81)..(81): Absent or Gln
  misc_feature (82)..(82): Absent or Gly
  misc_feature (83)..(83): Absent or His
  misc_feature (84)..(84): Absent or Asn
  misc_feature (85)..(85): Absent or His
  misc_feature (86)..(86): Absent or His
  misc_feature (87)..(87): Absent or Gln
  misc_feature (88)..(88): Absent or Glu
  misc_feature (89)..(89): Absent or Arg or Gly
  misc_feature (90)..(90): Absent or Pro
  misc_feature (91)..(91): Absent or Trp or His
  misc_feature (92)..(92): Absent or Ala or Cys
  misc_feature (93)..(93): Absent or Pro
  misc_feature (94)..(94): Absent or Cys or Leu
  misc_feature (95)..(95): Absent or Arg or His
  misc_feature (96)..(96): Absent or Arg
  misc_feature (97)..(97): Absent or Arg or Phe
  misc_feature (98)..(98): Absent or Arg or His
  misc_feature (99)..(99): Absent or Arg
  misc_feature (100)..(100): Absent or Gly
  misc_feature (101)..(101): Absent or Asp
  misc_feature (102)..(102): Absent or Gln
  misc_feature (103)..(103): Absent or Glu
  misc_feature (104)..(104): Absent or Asp
  misc_feature (105)..(105): Absent or Ile
  misc_feature (106)..(106): Absent or Ser
  misc_feature (107)..(107): Absent or Phe
  misc_feature (108)..(108): Absent or Leu
  misc_feature (109)..(109): Absent or His
  misc_feature (110)..(110): Absent or Leu
  misc_feature (111)..(111): Absent or Gln
  misc_feature (112)..(112): Absent or Gln
  misc_feature (113)..(113): Absent or Ile
  misc_feature (114)..(114): Absent or Cys
  misc_feature (115)..(115): Absent or Ile
  misc_feature (116)..(116): Absent or Gly
  misc_feature (117)..(117): Absent or Lys
  misc_feature (118)..(118): Absent or Leu
  misc_feature (119)..(119): Absent or Leu
  misc_feature (120)..(120): Absent or Leu
  misc_feature (121)..(121): Absent or Gly
  misc_feature (122)..(122): Absent or Val
  misc_feature (123)..(123): Absent or Pro
  misc_feature (124)..(124): Absent or Ala
  misc_feature (125)..(125): Absent or Lys
  misc_feature (126)..(126): Absent or Glu
  misc_feature (127)..(127): Absent or Asn
  misc_feature (128)..(128): Absent or Asp
  misc_feature (129)..(129): Absent or Leu
  misc_feature (130)..(130): Absent or Ser
  misc_feature (131)..(131): Absent or Gln
  misc_feature (132)..(132): Absent or Ile
  misc_feature (133)..(133): Absent or Phe
  misc_feature (134)..(134): Absent or Ala
  misc_feature (135)..(135): Absent or Trp
  misc_feature (136)..(136): Absent or Leu
  misc_feature (137)..(137): Absent or Phe
  misc_feature (138)..(138): Absent or Leu
  misc_feature (139)..(139): Absent or Ile
  misc_feature (140)..(140): Absent or Ser
  misc_feature (141)..(141): Absent or Ser
  misc_feature (142)..(142): Absent or Tyr
  misc_feature (143)..(143): Absent or Pro
  misc_feature (144)..(144): Absent or Met
  misc_feature (145)..(145): Absent or Ile
  misc_feature (146)..(146): Absent or Leu
  misc_feature (147)..(147): Absent or Gln
  misc_feature (148)..(148): Absent or His
  misc_feature (149)..(149): Absent or Ile
  misc_feature (150)..(150): Absent or His
  misc_feature (151)..(151): Absent or Ser
  misc_feature (152)..(152): Absent or Phe
  misc_feature (153)..(153): Absent or Leu
  misc_feature (154)..(154): Absent or Gln
  misc_feature (155)..(155): Absent or Gly
  misc_feature (156)..(156): Absent or Ala or Ser
  misc_feature (157)..(157): Absent or Pro or Lys
  misc_feature (158)..(158): Absent or Val
  misc_feature (159)..(159): Absent or Leu
  misc_feature (160)..(160): Absent or Arg
  misc_feature (161)..(161): Absent or Ser
  misc_feature (162)..(162): Absent or Arg
  misc_feature (163)..(163): Absent or Arg
  misc_feature (164)..(164): Absent or Phe
  misc_feature (165)..(165): Absent or Ile
  misc_feature (166)..(166): Absent or Thr
  misc_feature (167)..(167): Absent or Ile
  misc_feature (168)..(168): Absent or Pro
  misc_feature (169)..(169): Absent or Ser
  misc_feature (170)..(170): Absent or Thr
  misc_feature (171)..(171): Absent or Thr
  misc_feature (172)..(172): Absent or Tyr
  misc_feature (173)..(173): Absent or His
  misc_feature (205)..(205): Pro or Gln or Leu
  misc_feature (206)..(206): Asn or Gly or Asp
  misc_feature (207)..(207): Trp or Absent or Pro
  misc_feature (208)..(208): Arg or Absent or Trp
  misc_feature (209)..(209): Arg or Absent
  misc_feature (210)..(210): Absent or Lys
  misc_feature (211)..(211): Absent or Glu
  misc_feature (212)..(212): Absent or Cys
  misc_feature (213)..(213): Val or Absent or Ile
  misc_feature (214)..(214): Thr or Ala or Cys
  misc_feature (215)..(215): Val or Arg
  misc_feature (216)..(216): Ser or Leu or Ile
  misc_feature (217)..(217): Ser or Leu or Met
  misc_feature (218)..(218): Gly or Absent
  misc_feature (219)..(219): His or Absent or Leu
  misc_feature (220)..(220): Gly or Absent or Glu
  misc_feature (221)..(221): Arg or Absent or Ile
  misc_feature (222)..(222): Ser or Arg or Lys
  misc_feature (223)..(223): Lys or Arg
  misc_feature (224)..(224): His or Gln or Ser
  misc_feature (225)..(225): Gly or His
  misc_feature (227)..(227): Trp or Gln or Lys
  misc_feature (228)..(228): Arg or Gly or Ile
  misc_feature (229)..(229): Val or Arg or Trp
  misc_feature (230)..(230): Tyr or Glu
  misc_feature (231)..(231): Ala or Asp or Arg
  misc_feature (232)..(232): Ala or Gln or Ser
  misc_feature (233)..(233): Leu or Phe
  misc_feature (234)..(234): Asp or Ser
  misc_feature (235)..(235): Val or His or Phe
  misc_feature (236)..(236): Gly or Ala
  misc_feature (237)..(237): Arg or Gly
  misc_feature (238)..(238): Val or Thr
  misc_feature (239)..(239): Leu or Pro
  misc_feature (240)..(240): Pro or Ser
  misc_feature (241)..(241): Gly or Arg
  misc_feature (242)..(242): Gly or Absent or Ser
  misc_feature (243)..(243): Absent or Leu
  misc_feature (244)..(244): Absent or Pro
  misc_feature (245)..(245): Absent or Ile
  misc_feature (246)..(246): Absent or Gln
  misc_feature (247)..(247): Absent or Ile
  misc_feature (248)..(248): Absent or Cys
  misc_feature (249)..(249): Absent or Cys
  misc_feature (250)..(250): Absent or Arg
  misc_feature (251)..(251): Absent or Arg or Trp
  misc_feature (252)..(252): Absent or Arg
  misc_feature (253)..(253): Absent or Lys
  misc_feature (254)..(254): Absent or Glu
  misc_feature (255)..(255): Absent or Met
  misc_feature (256)..(256): Absent or Ser
  misc_feature (257)..(257): Absent or Ser
  misc_feature (258)..(258): Absent or Ser
  misc_feature (259)..(259): Ser or Pro
  misc_feature (260)..(260): Phe or Leu
  misc_feature (261)..(261): Val or Gly or Asn
  misc_feature (262)..(262): Arg or Absent
  misc_feature (263)..(263): Absent or Cys
  misc_feature (264)..(264): Absent or Asn
  misc_feature (265)..(265): Absent or Gly
  misc_feature (266)..(266): Absent or Gln
  misc_feature (267)..(267): Absent or Cys
  misc_feature (268)..(268): Absent or Gly
  misc_feature (269)..(269): Absent or Pro
  misc_feature (270)..(270): Absent or Ser
  misc_feature (271)..(271): Absent or Cys
  misc_feature (272)..(272): Absent or Leu
  misc_feature (273)..(273): Absent or Cys
  misc_feature (274)..(274): Asp or Ala or Pro
  misc_feature (275)..(275): Met or Gln or Lys
  misc_feature (276)..(276): Glu or Cys
  misc_feature (277)..(277): Thr or Glu
  misc_feature (278)..(278): Thr or Gln or Arg
  misc_feature (279)..(279): Phe or Pro or Gly
  misc_feature (280)..(280): Glu or Gln or Arg
  misc_feature (282)..(282): Val or Gly or Ala
  misc_feature (283)..(283): Absent or Thr
  misc_feature (284)..(284): Absent or Ser
  misc_feature (285)..(285): Absent or Phe
  misc_feature (286)..(286): Absent or Ser
  misc_feature (287)..(287): Absent or Arg
  misc_feature (288)..(288): Absent or Leu
  misc_feature (289)..(289): Absent or Leu
  misc_feature (290)..(290): Absent or Gln
  misc_feature (291)..(291): Absent or Phe
  misc_feature (292)..(292): Absent or Pro
  misc_feature (293)..(293): Absent or Gly
  misc_feature (294)..(294): Absent or Thr
  misc_feature (295)..(295): Absent or Gly
  misc_feature (296)..(296): Absent or Gln
  misc_feature (297)..(297): Absent or Gly
  misc_feature (298)..(298): Absent or Leu
  misc_feature (299)..(299): Absent or Arg
  misc_feature (300)..(300): Absent or Gln
  misc_feature (301)..(301): Absent or Gly
  misc_feature (302)..(302): Absent or Ala
  misc_feature (303)..(303): Absent or Ser
  misc_feature (304)..(304): Absent or Cys
  misc_feature (305)..(305): Absent or Ser
  misc_feature (306)..(306): Absent or Ser
  misc_feature (307)..(307): Absent or Ile
  misc_feature (308)..(308): Absent or Ser
  misc_feature (309)..(309): Absent or Thr
  misc_feature (310)..(310): Absent or Pro
  misc_feature (311)..(311): Absent or Ser
  misc_feature (312)..(312): Absent or Arg
  misc_feature (313)..(313): Absent or Cys
  misc_feature (314)..(314): Absent or Ser
  misc_feature (315)..(315): Absent or Leu
  misc_feature (316)..(316): Absent or Thr
  misc_feature (317)..(317): Absent or Glu
  misc_feature (318)..(318): Absent or Leu
  misc_feature (319)..(319): Absent or Gly
  misc_feature (320)..(320): Absent or Arg
  misc_feature (321)..(321): Absent or Lys
  misc_feature (322)..(322): Absent or Leu
  misc_feature (323)..(323): Absent or Cys
  misc_feature (324)..(324): Absent or Ala
  misc_feature (325)..(325): Absent or Ala
  misc_feature (326)..(326): Absent or Ala
  misc_feature (327)..(327): Absent or Ala
  misc_feature (328)..(328): Absent or His
  misc_feature (329)..(329): Absent or Ser
  misc_feature (330)..(330): Ser or Pro
  misc_feature (331)..(331): Val or Gln
  misc_feature (332)..(332): Asn or Pro or Ser
  misc_feature (333)..(333): Ser or His or Pro
  misc_feature (334)..(334): Val or Leu
  misc_feature (335)..(335): Lys or Gln or His
  misc_feature (336)..(336): Asn or Gln or Arg
  misc_feature (338)..(338): Absent or Gly
  misc_feature (339)..(339): Absent or Leu
  misc_feature (340)..(340): Ser or Gly
  misc_feature (341)..(341): Cys or Arg
  misc_feature (342)..(342): Glu or Arg or Pro
  misc_feature (343)..(343): Leu or X or Pro
  misc_feature (344)..(344): Glu or Absent or Ser
  misc_feature (345)..(345): Asp or Absent or Gly
  misc_feature (346)..(346): Val or Absent
  misc_feature (347)..(347): Asn or Absent or Ser
  misc_feature (348)..(348): His or Absent or Arg
  misc_feature (349)..(349): Val or Absent or Pro
  misc_feature (350)..(350): Absent or Asn
  misc_feature (351)..(351): Absent or Pro
  misc_feature (352)..(352): Absent or Gln
  misc_feature (353)..(353): Absent or Val
  misc_feature (354)..(354): Absent or X
  unsure (1)..(354): unsure at all Xaa locations
XXXXXXXXXXXXXXXXXXXXXXXXXXXXXXXXXXXXXXXXXXXXXXXXXXXXXXXXXXXXXXXXXXXXXXXXXXXXXXXXXXXXXXXXXXXXXXXXXXXXXXXXXXXXXXXXXXXXXXXXXXXXXXXXXXXXXXXXXXXXXXXXXXXXXXXXXXXXXXXXXXXXXXXXXXXXXQHQHSSLSTTSTRSLLSHDRLTPHPRGRLQEXXXXXXXXXXXXXXXXXXXXXAXXXXXXXXXXXXXXXXXXXXXXXXXXXXXXXXXXXXXXXXXXXXXXXXXXXXXXVXXXXXXXXXXXXXXXXXXXXXXXXXXXXXXXXXXXXXXXXXXXXXXXXXXXXXXXEXXXXXXXXXXXXXXXXX

SEQ ID NO: 36453 - protein, 305 aa, Artificial sequence
  consensus sequence of seq id no: 365 and its homologs
  misc_feature (1)..(1): Met or Absent
  misc_feature (2)..(2): Arg or Absent
  misc_feature (3)..(3): Trp or Absent
  misc_feature (4)..(4): Gly or Absent
  misc_feature (5)..(5): Met or Absent
  misc_feature (6)..(6): Glu or Absent
  misc_feature (7)..(7): Ile or Absent
  misc_feature (8)..(8): Leu or Absent
  misc_feature (9)..(9): Ser or Absent
  misc_feature (10)..(10): Pro or Absent or Met
  misc_feature (11)..(11): Ala or Absent or Ser
  misc_feature (12)..(12): Ser or Absent or Gly or Ala
  misc_feature (13)..(13): Tyr or Absent or Gly or Arg
  misc_feature (14)..(14): His or Absent or Ser
  misc_feature (15)..(15): Ser or Absent
  misc_feature (16)..(16): Asn or Absent or Ser
  misc_feature (17)..(17): Ser or Absent or Arg
  misc_feature (19)..(19): Tyr or Absent or Ser or Asn or Thr or Arg
  misc_feature (20)..(20): Leu or Absent or Ser or Asn
  misc_feature (21)..(21): Leu or Absent or Pro or Ser
  misc_feature (22)..(22): Glu or Absent or Asn or Ser
  misc_feature (23)..(23): Glu or Absent or Met or Ser
  misc_feature (24)..(24): Ser or Absent or Ala or Val
  misc_feature (25)..(25): Lys or Absent or Ser or Asn
  misc_feature (26)..(26): Ser or Absent or Gly or Met
  misc_feature (27)..(27): Thr or Absent or Ser or Lys or Met or Ile or Asp or Ala
  misc_feature (29)..(29): Arg or Absent or Asn or Glu or Lys or Gln
  misc_feature (32)..(32): Ile or Absent or Ser or Arg or Pro or Gln or Lys
  misc_feature (37)..(37): Leu or Absent or Met
  misc_feature (40)..(40): Asn or Arg or Glu or Gln
  misc_feature (47)..(47): Lys or Gln or Glu or Val
  misc_feature (48)..(48): Glu or Asp or Gly or Ser
  misc_feature (49)..(49): Thr or Ser or Ala
  misc_feature (51)..(51): Asp or Asn
  misc_feature (52)..(52): Arg or Leu
  misc_feature (54)..(54): His or Asp or Glu
  misc_feature (57)..(57): Ala or Ser
  misc_feature (58)..(58): Ala or Arg or Ser
  misc_feature (63)..(63): Absent or Ile or Thr
  misc_feature (65)..(65): Thr or Ser
  misc_feature (71)..(71): Lys or Arg or Cys or Leu
  misc_feature (73)..(73): Tyr or Phe
  misc_feature (74)..(74): Lys or Glu or Gln
  misc_feature (75)..(75): Glu or Ile or Met or Asp or Asn or Phe
  misc_feature (77)..(77): Glu or Val or Thr or Asp or Ile
  misc_feature (78)..(78): Asp or Glu or Tyr
  misc_feature (81)..(81): Ser or Lys or Gln or Asn
  misc_feature (82)..(82): Ser or Phe or Gln or Thr or Met or Asn or Leu
  misc_feature (85)..(85): Ala or Ser or His
  misc_feature (87)..(87): Leu or Arg or Glu or His or Asn
  misc_feature (90)..(90): Ile or Phe or Leu or Tyr
  misc_feature (94)..(94): Asn or Arg or Absent or Lys or Gly
  misc_feature (96)..(96): Asn or Thr or Arg or Gln or His or Ile
  misc_feature (98)..(98): Ser or Gly or Tyr or Phe or Absent or Ala
  misc_feature (99)..(99): Pro or Absent
  misc_feature (100)..(100): Phe or Absent
  misc_feature (101)..(101): Thr or Absent
  misc_feature (102)..(102): Leu or Absent
  misc_feature (103)..(103): Glu or Absent
  misc_feature (104)..(104): Trp or Absent
  misc_feature (105)..(105): Gly or Absent
  misc_feature (106)..(106): Asn or Absent
  misc_feature (107)..(107): Asn or Absent
  misc_feature (108)..(108): Phe or Absent
  misc_feature (109)..(109): His or Absent
  misc_feature (110)..(110): Gly or Absent
  misc_feature (111)..(111): Phe or Absent
  misc_feature (112)..(112): Asp or Absent
  misc_feature (113)..(113): Gly or Absent
  misc_feature (114)..(114): Phe or Absent
  misc_feature (115)..(115): Lys or Absent
  misc_feature (116)..(116): Pro or Absent
  misc_feature (117)..(117): Gly or Absent
  misc_feature (118)..(118): Gly or Ala or Absent
  misc_feature (119)..(119): Lys or Absent
  misc_feature (120)..(120): Arg or Absent
  misc_feature (121)..(121): Ser or Absent
  misc_feature (122)..(122): Ser or Absent
  misc_feature (124)..(124): Thr or Met or Asn or Absent
  misc_feature (125)..(125): Arg or Lys or Absent
  misc_feature (126)..(126): Pro or Ala or Ser or Absent or Gly
  misc_feature (127)..(127): Cys or Glu or Absent or Ser or Lys
  misc_feature (128)..(128): Glu or Tyr or Absent or Leu or Val
  misc_feature (129)..(129): Gln or His or Absent or Met
  misc_feature (130)..(130): Glu or Arg or Cys or Absent or Pro
  misc_feature (131)..(131): Arg or Met or Ile or Absent or Thr
  misc_feature (132)..(132): Lys or Asp or Absent or Asn
  misc_feature (133)..(133): Lys or Asp or Absent or Tyr
  misc_feature (134)..(134): Gly or Absent or Val
  misc_feature (135)..(135): Val or Absent or Gly
  misc_feature (136)..(136): Pro or Absent or Ser or Thr
  misc_feature (137)..(137): Trp or Absent or Asn or Ser
  misc_feature (138)..(138): Thr or Absent or Pro or Lys
  misc_feature (139)..(139): Glu or Absent or Ser or Ala
  misc_feature (140)..(140): Glu or Ser or Gln or Absent or Ile or Asn
  misc_feature (141)..(141): Glu or Ala or Absent or Met or Trp
  misc_feature (142)..(142): His or Ala or Pro or Absent or Thr or Lys
  misc_feature (143)..(143): Lys or Pro or Arg or Absent or His
  misc_feature (144)..(144): Leu or Val or Absent or Ile
  misc_feature (145)..(145): Phe or Asn or Lys or Absent or Ser or Thr
  misc_feature (146)..(146): Leu or Glu or Asn or Absent or Tyr
  misc_feature (147)..(147): Leu or Val or Absent or Phe
  misc_feature (148)..(148): Gly or Ala or Asn or Absent or Gln
  misc_feature (149)..(149): Leu or Met or Absent
  misc_feature (150)..(150): Lys or Asn or Absent
  misc_feature (151)..(151): Lys or Absent
  misc_feature (152)..(152): Tyr or Absent
  misc_feature (153)..(153): Gly or Absent
  misc_feature (154)..(154): Lys or Absent
  misc_feature (155)..(155): Gly or Absent
  misc_feature (156)..(156): Asp or Absent
  misc_feature (157)..(157): Trp or Absent
  misc_feature (158)..(158): Arg or Absent
  misc_feature (159)..(159): Asn or Absent
  misc_feature (160)..(160): Ile or Absent
  misc_feature (161)..(161): Ser or Absent
  misc_feature (162)..(162): Arg or Absent
  misc_feature (163)..(163): Asn or Absent
  misc_feature (164)..(164): Tyr or Absent
  misc_feature (165)..(165): Val or Absent
  misc_feature (166)..(166): Ile or Absent
  misc_feature (167)..(167): Thr or Absent
  misc_feature (168)..(168): Arg or Absent
  misc_feature (169)..(169): Thr or Absent
  misc_feature (170)..(170): Pro or Absent
  misc_feature (171)..(171): Thr or Absent
  misc_feature (172)..(172): Gln or Absent
  misc_feature (173)..(173): Val or Absent
  misc_feature (174)..(174): Ala or Absent
  misc_feature (175)..(175): Ser or Absent
  misc_feature (176)..(176): His or Absent
  misc_feature (177)..(177): Ala or Absent
  misc_feature (178)..(178): Gln or Absent
  misc_feature (179)..(179): Lys or Absent
  misc_feature (180)..(180): Tyr or Absent
  misc_feature (181)..(181): Phe or Absent
  misc_feature (182)..(182): Ile or Absent
  misc_feature (183)..(183): Arg or Absent
  misc_feature (184)..(184): Gln or Absent
  misc_feature (185)..(185): Leu or Absent
  misc_feature (186)..(186): Ser or Absent
  misc_feature (187)..(187): Gly or Absent
  misc_feature (188)..(188): Gly or Absent
  misc_feature (189)..(189): Lys or Absent
  misc_feature (190)..(190): Asp or Absent
  misc_feature (191)..(191): Lys or Absent
  misc_feature (192)..(192): Arg or Absent
  misc_feature (193)..(193): Arg or Absent
  misc_feature (194)..(194): Ala or Absent
  misc_feature (195)..(195): Ser or Absent
  misc_feature (196)..(196): Ile or Absent
  misc_feature (197)..(197): His or Absent
  misc_feature (198)..(198): Asp or Absent
  misc_feature (199)..(199): Ile or Absent
  misc_feature (200)..(200): Thr or Absent
  misc_feature (201)..(201): Thr or Absent
  misc_feature (202)..(202): Val or Absent
  misc_feature (203)..(203): Asn or Absent
  misc_feature (204)..(204): Leu or Absent
  misc_feature (205)..(205): Asn or Absent
  misc_feature (206)..(206): Glu or Absent
  misc_feature (207)..(207): Asn or Absent
  misc_feature (208)..(208): Gln or Absent
  misc_feature (209)..(209): Thr or Absent
  misc_feature (210)..(210): Pro or Absent
  misc_feature (211)..(211): Gln or Absent
  misc_feature (212)..(212): Glu or Absent
  misc_feature (213)..(213): Glu or Absent
  misc_feature (214)..(214): Lys or Absent
  misc_feature (215)..(215): Ile or Absent
  misc_feature (216)..(216): Val or Absent
  misc_feature (217)..(217): Pro or Absent
  misc_feature (218)..(218): Ser or Absent
  misc_feature (219)..(219): Pro or Absent
  misc_feature (220)..(220): Glu or Absent
  misc_feature (221)..(221): Glu or Absent
  misc_feature (222)..(222): His or Absent
  misc_feature (223)..(223): Ser or Absent
  misc_feature (224)..(224): Thr or Absent
  misc_feature (225)..(225): Gly or Absent
  misc_feature (226)..(226): Leu or Absent
  misc_feature (227)..(227): Ser or Absent
  misc_feature (228)..(228): Gln or Absent
  misc_feature (229)..(229): Gln or Absent
  misc_feature (230)..(230): Pro or Absent
  misc_feature (231)..(231): Asn or Absent
  misc_feature (232)..(232): Thr or Absent
  misc_feature (233)..(233): Ala or Absent
  misc_feature (234)..(234): Thr or Absent
  misc_feature (235)..(235): Ser or Absent
  misc_feature (236)..(236): Phe or Absent
  misc_feature (237)..(237): Gln or Absent
  misc_feature (238)..(238): Trp or Absent
  misc_feature (239)..(239): Asn or Absent
  misc_feature (240)..(240): His or Absent
  misc_feature (241)..(241): Pro or Absent
  misc_feature (242)..(242): Asn or Absent
  misc_feature (243)..(243): Ser or Absent
  misc_feature (244)..(244): Gly or Absent
  misc_feature (245)..(245): Lys or Absent
  misc_feature (246)..(246): Val or Absent
  misc_feature (247)..(247): Ala or Absent
  misc_feature (248)..(248): Met or Absent
  misc_feature (249)..(249): Asp or Absent
  misc_feature (250)..(250): Phe or Absent
  misc_feature (251)..(251): Asn or Absent
  misc_feature (252)..(252): Gln or Absent
  misc_feature (253)..(253): Thr or Absent
  misc_feature (254)..(254): Cys or Absent
  misc_feature (255)..(255): Glu or Absent
  misc_feature (256)..(256): Asn or Absent
  misc_feature (257)..(257): Met or Absent
  misc_feature (258)..(258): Phe or Absent
  misc_feature (259)..(259): Met or Absent
  misc_feature (260)..(260): Pro or Absent
  misc_feature (261)..(261): Pro or Absent
  misc_feature (262)..(262): Pro or Absent
  misc_feature (263)..(263): Tyr or Absent
  misc_feature (264)..(264): Gly or Absent
  misc_feature (265)..(265): Val or Absent
  misc_feature (266)..(266): Leu or Absent
  misc_feature (267)..(267): Asn or Absent
  misc_feature (268)..(268): Thr or Absent
  misc_feature (269)..(269): Tyr or Absent
  misc_feature (270)..(270): Gly or Absent
  misc_feature (271)..(271): Leu or Absent
  misc_feature (272)..(272): Lys or Absent
  misc_feature (273)..(273): Met or Absent
  misc_feature (274)..(274): Gln or Absent
  misc_feature (275)..(275): Gly or Absent
  misc_feature (276)..(276): Gln or Absent
  misc_feature (277)..(277): Asn or Absent
  misc_feature (278)..(278): Gln or Absent
  misc_feature (279)..(279): Gln or Absent
  misc_feature (280)..(280): Arg or Absent
  misc_feature (281)..(281): Asn or Absent
  misc_feature (282)..(282): Val or Absent
  misc_feature (283)..(283): Val or Absent
  misc_feature (284)..(284): Gln or Absent
  misc_feature (285)..(285): Glu or Absent
  misc_feature (286)..(286): Ser or Absent
  misc_feature (287)..(287): Phe or Absent
  misc_feature (288)..(288): Leu or Absent
  misc_feature (289)..(289): Gly or Absent
  misc_feature (290)..(290): Pro or Absent
  misc_feature (291)..(291): Gln or Absent
  misc_feature (292)..(292): Ser or Absent
  misc_feature (293)..(293): Met or Absent
  misc_feature (294)..(294): Val or Absent
  misc_feature (295)..(295): Phe or Absent
  misc_feature (296)..(296): Gln or Absent
  misc_feature (297)..(297): Met or Absent
  misc_feature (298)..(298): Gln or Absent
  misc_feature (299)..(299): Ser or Absent
  misc_feature (300)..(300): Ala or Absent
  misc_feature (301)..(301): Arg or Absent
  misc_feature (302)..(302): His or Absent
  misc_feature (303)..(303): Tyr or Absent
  misc_feature (304)..(304): Pro or Absent
  misc_feature (305)..(305): His or Absent
  unsure (1)..(305): unsure at all Xaa locations
XXXXXXXXXXXXXXXXXSXXXXXXXXXSXWSXKENKXFEXALAYYGXXXPXXWXKVXXAMGGXKXAEEVRXHXXXLXXDVXXIEXGXVPXPKYXTXGXXXXXXXXXXXXXXXXXXXXXXXXXWXXXXXXXXXXXXXXXXXXXXXXXXXXXXXXXXXXXXXXXXXXXXXXXXXXXXXXXXXXXXXXXXXXXXXXXXXXXXXXXXXXXXXXXXXXXXXXXXXXXXXXXXXXXXXXXXXXXXXXXXXXXXXXXXXXXXXXXXXXXXXXXXXXXXXXXXXXXXXXXXXXXXXXXXXXXXXXXXXXXXXX

SEQ ID NO: 36454 - protein, 348 aa, Artificial sequence
  consensus sequence of seq id no: 373  and its homologs
  misc_feature (1)..(1): Absent or Met
  misc_feature (2)..(2): Absent or Ala
  misc_feature (3)..(3): Absent or Met or Arg
  misc_feature (4)..(4): Absent or Ser or His or Met
  misc_feature (5)..(5): Met or Absent or Cys or Lys
  misc_feature (6)..(6): Gln or Absent or Glu or Arg or Ser
  misc_feature (7)..(7): Thr or Absent or Pro or Ser or Met or Ile
  misc_feature (8)..(8): Arg or Absent or Leu or Gly
  misc_feature (9)..(9): Ser or Absent or Pro or Gly or Leu or Trp
  misc_feature (10)..(10): Ser or Met or Absent or Leu or Arg or Glu
  misc_feature (11)..(11): Ser or Glu or Met or Absent or Lys or Asn
  misc_feature (12)..(12): Ser or Thr or Asn or Ala or Absent or Pro or Lys or Ile or Leu
  misc_feature (13)..(13): Pro or Glu or Arg or Thr or Absent or Cys or Gly
  misc_feature (14)..(14): Ser or Phe or Pro or Absent or Arg or Leu or Thr
  misc_feature (15)..(15): Ala or Cys or Met or Leu or Absent or Val
  misc_feature (16)..(16): Asn or Glu or Asp or Gln or Absent or Pro or Ser
  misc_feature (17)..(17): His or Phe or Val or Absent or Arg or Gly
  misc_feature (18)..(18): Arg or Ser or Glu or Gln or Absent or Thr
  misc_feature (19)..(19): Arg or Leu or Met or Absent or Pro or Gly
  misc_feature (20)..(20): Glu or Pro or Absent or Arg or Leu or Val
  misc_feature (21)..(21): Thr or Leu or His or Absent or Pro or Trp
  misc_feature (22)..(22): Gln or Glu or Leu or Absent or Val or Arg
  misc_feature (23)..(23): Leu or Asp or Asn or Absent or Phe or Lys or Ala
  misc_feature (24)..(24): Gln or Met or Leu or Ala or Absent or Glu or Ile or Thr
  misc_feature (25)..(25): Ile or Phe or Asn or Absent or Leu
  misc_feature (26)..(26): Ala or Lys or Arg or Asp or Absent or Gly
  misc_feature (27)..(27): Asp or Ile or Asn or Absent or Pro
  misc_feature (28)..(28): Pro or Phe or Val or Gly or Absent or Glu or Ser
  misc_feature (29)..(29): Thr or Glu or Met or Asp or Absent or His or Pro
  misc_feature (30)..(30): Ser or His or Asn or Ala or Absent or Leu or Glu
  misc_feature (31)..(31): Phe or Ile or Leu or Gln or Absent or Asp
  misc_feature (32)..(32): Cys or Arg or Asn or Absent or Asp or Thr or Val
  misc_feature (33)..(33): Gly or Glu or Gln or Absent or Pro or Ala or Ser
  misc_feature (34)..(34): Lys or Phe or His or Absent or Gln or Arg or Asn
  misc_feature (35)..(35): Ile or Asn or Glu or Absent or Pro or Lys
  misc_feature (36)..(36): Met or Absent or Thr or Gln or Cys or Ile
  misc_feature (37)..(37): Pro or Absent or Ile or Ser or Val
  misc_feature (38)..(38): Gly or Absent or Pro or Arg or Gln
  misc_feature (39)..(39): Trp or Absent or Met or Asn or Gln or Arg
  misc_feature (40)..(40): Thr or Val or Leu or Glu or Absent or Lys or His
  misc_feature (41)..(41): Val or Thr or Gln or Phe or Absent or Leu or Met or His or Ile
  misc_feature (42)..(42): Val or Ile or Gln or Absent or Ala or Met or Ser
  misc_feature (43)..(43): Asn or Val or Ile or Absent or Met or Thr
  misc_feature (44)..(44): Arg or Thr or Val or Leu or Absent or Gln
  misc_feature (45)..(45): Pro or Ser or Gln or Thr or Absent or Ile or Glu or Leu
  misc_feature (46)..(46): Arg or Ala or Ser or Absent or Glu or Lys
  misc_feature (47)..(47): Ser or Asn or Pro or Absent or Gln or Phe or Leu
  misc_feature (48)..(48): Ser or Thr or Absent or Gln or Phe or Pro
  misc_feature (49)..(49): Asn or Gln or Lys or His or Absent or Thr or Pro
  misc_feature (50)..(50): Asn or Tyr or Val or Phe or Absent or Ala
  misc_feature (51)..(51): Gly or Glu or Arg or Absent or Lys or Met or Leu
  misc_feature (52)..(52): Val or Thr or Leu or Absent or Gln or Met
  misc_feature (53)..(53): Val or Leu or Pro or Absent
  misc_feature (54)..(54): Asp or Pro or Absent or Arg
  misc_feature (55)..(55): Absent or Gly or Asp
  misc_feature (56)..(56): Absent or His or Trp
  misc_feature (57)..(57): Absent or Leu or Val
  misc_feature (58)..(58): Absent or Ile or Val
  misc_feature (59)..(59): Absent or Ala or Glu or Arg
  misc_feature (60)..(60): Absent or Phe or Gln or Glu or Lys
  misc_feature (61)..(61): Absent or Asn or Arg or Lys or Val
  misc_feature (62)..(62): Absent or Pro or Arg
  misc_feature (63)..(63): Absent or Arg
  misc_feature (64)..(64): Absent or Pro or Ala
  misc_feature (65)..(65): Absent or Ser
  misc_feature (66)..(66): Absent or Asn or His or Gly
  misc_feature (67)..(67): Absent or Pro or Glu or Lys
  misc_feature (68)..(68): Absent or Asn or Ser
  misc_feature (69)..(69): Absent or His or Arg or Cys
  misc_feature (70)..(70): Absent or Gly
  misc_feature (71)..(71): Absent or Leu
  misc_feature (72)..(72): Absent or Ile or Val or Phe
  misc_feature (73)..(73): Absent or Ser or Asp
  misc_feature (74)..(74): Thr or Phe or Arg or Absent or Lys
  misc_feature (77)..(77): Ile or Tyr or Absent
  misc_feature (80)..(80): Gly or His or Absent or Glu or Ser
  misc_feature (83)..(83): Arg or Gln or Absent
  misc_feature (84)..(84): Gln or Lys or Absent or Arg
  misc_feature (89)..(89): Glu or Val or Leu or Absent or Lys or Ser or Ile
  misc_feature (91)..(91): Ile or Val or Absent
  misc_feature (92)..(92): His or Gln or Lys or Absent
  misc_feature (93)..(93): Arg or Absent or Lys
  misc_feature (94)..(94): His or Tyr or Absent
  misc_feature (96)..(96): Ala or Asn or Thr or Absent or Ser
  misc_feature (98)..(98): Glu or Gly or Absent or Lys
  misc_feature (99)..(99): Val or Glu or Absent or Met or Thr
  misc_feature (100)..(100): Asn or Thr or Absent or Glu or Ser
  misc_feature (101)..(101): Asp or Lys or Gly or Arg or Absent or Asn
  misc_feature (102)..(102): Arg or Asp or Absent or Thr or Ser
  misc_feature (103)..(103): Arg or Tyr or Cys or Absent or Pro or Ala
  misc_feature (104)..(104): Leu or Val or Absent or Lys
  misc_feature (105)..(105): Thr or Ser or Pro or Ile or Absent or Val
  misc_feature (106)..(106): Arg or Thr or Ser or Absent or Ala or Leu or Gly
  misc_feature (107)..(107): Ala or Glu or Gln or Absent or Asn or Gly
  misc_feature (108)..(108): Gly or Arg or Absent or Thr or Pro
  misc_feature (109)..(109): Ser or Met or Ile or Absent or Asp or Asn
  misc_feature (110)..(110): Phe or Ile or Absent or Met or Lys
  misc_feature (111)..(111): Phe or Ser or Absent or Pro or Glu or Lys
  misc_feature (112)..(112): Gln or Glu or Absent or Lys
  misc_feature (113)..(113): Asp or Asn or Absent or Glu or Ile
  misc_feature (114)..(114): Lys or Asn or Absent or Glu or Asp or Gln
  misc_feature (115)..(115): Thr or Asn or Arg or Absent or Glu or Val or Ile
  misc_feature (116)..(116): Arg or Thr or Asn or Lys or Absent or Gln or Ala or Asp
  misc_feature (117)..(117): Val or Thr or Leu or Asn or Absent or Pro
  misc_feature (118)..(118): Tyr or Phe or Pro or Absent or His or Lys
  misc_feature (119)..(119): Glu or Ile or Asp or Absent or Gln or Arg
  misc_feature (120)..(120): Gly or Lys or Glu or Absent or Leu or Phe
  misc_feature (121)..(121): Ser or Trp or Ile or Met or Lys
  misc_feature (122)..(122): Arg or Leu or Gly or Trp or Ala or Absent or Ser
  misc_feature (123)..(123): Thr or Lys or Val or Absent
  misc_feature (124)..(124): Lys or Arg or Glu or Absent
  misc_feature (125)..(125): Gln or His or Absent
  misc_feature (126)..(126): Asp or Lys or Arg or Absent
  misc_feature (127)..(127): His or Phe or Pro or Absent
  misc_feature (128)..(128): Cys or Arg or Absent
  misc_feature (129)..(129): Gly or Cys or Leu or Absent
  misc_feature (130)..(130): Absent or Pro or Ser
  misc_feature (131)..(131): Absent or Ser or Asn
  misc_feature (132)..(132): Absent or Ser
  misc_feature (133)..(133): Absent or Asp
  misc_feature (134)..(134): Absent or Phe or Arg
  misc_feature (135)..(135): Absent or Glu or Val
  misc_feature (136)..(136): Absent or Gly or Asp
  misc_feature (137)..(137): Absent or Arg
  misc_feature (138)..(138): Absent or Tyr
  misc_feature (139)..(139): Absent or Tyr
  misc_feature (140)..(140): Absent or Ile
  misc_feature (141)..(141): Absent or Glu
  misc_feature (142)..(142): Val or Gly or Pro or Absent
  misc_feature (143)..(143): Glu or Leu or Arg or Absent or Met
  misc_feature (144)..(144): Tyr or Thr or Ser or Val or Ala or Gln or Absent
  misc_feature (145)..(145): Ala or Gly or Trp or Ile or Absent or Leu
  misc_feature (146)..(146): Ser or Lys or Gln or Arg or Met or Absent or Phe
  misc_feature (147)..(147): Lys or Asn or Gln or Asp or Absent
  misc_feature (148)..(148): Gly or Ala or Phe or Trp or Pro or Absent or Leu
  misc_feature (149)..(149): Phe or Cys or Arg or Asn or Gly or Absent or Pro
  misc_feature (150)..(150): Arg or Ser or Leu or Absent or Asn
  misc_feature (151)..(151): Leu or Ala or Glu or Absent or Gly
  misc_feature (152)..(152): Pro or Thr or Arg or Lys or Leu or Absent or Trp
  misc_feature (153)..(153): Arg or Pro or Ser or Ala or Absent or Ile
  misc_feature (154)..(154): Gly or Lys or Val or Leu or Asp or Absent
  misc_feature (155)..(155): Trp or Val or Gln or Glu or Asp or Asn or Absent
  misc_feature (156)..(156): Ser or Pro or Arg or Asn or Trp or Absent or Lys
  misc_feature (157)..(157): Val or Lys or Tyr or Phe or Absent
  misc_feature (158)..(158): Glu or Pro or Leu or Phe
  misc_feature (159)..(159): Glu or Ser or Met or Leu or Gln or Gly or Arg
  misc_feature (160)..(160): Val or Asn or Ala or Absent or Lys
  misc_feature (161)..(161): Pro or Gly or Glu or Arg or Asn
  misc_feature (162)..(162): Arg or Glu or Ala or Ser or Thr or Met
  misc_feature (163)..(163): Lys or Asn or Arg or Ser or Glu
  misc_feature (164)..(164): Asn or Thr or Asp or Ala or Ser or Cys
  misc_feature (165)..(165): Ser or Cys or Tyr or Absent or Ala
  misc_feature (166)..(166): His or Arg or Leu or Thr or Ile or Gly or Absent
  misc_feature (167)..(167): Tyr or Ala or Pro or Thr or Gln or Absent or Ile
  misc_feature (168)..(168): Ile or Thr or Absent
  misc_feature (169)..(169): Asp or Pro or Glu or Leu or His or Absent
  misc_feature (171)..(171): Tyr or Leu or Met or Ser or Arg or Absent or His
  misc_feature (172)..(172): Tyr or Val or Ile or Ala or Pro
  misc_feature (173)..(173): Val or Ser or Tyr or Ile or Phe
  misc_feature (174)..(174): Glu or Lys
  misc_feature (175)..(175): Arg or Cys or Asn or Ser or Pro
  misc_feature (179)..(179): Lys or Ile or Glu or Arg
  misc_feature (180)..(180): Arg or Lys or Gln
  misc_feature (181)..(181): Phe or Ser or Arg or Met
  misc_feature (182)..(182): Arg or Thr or Ala
  misc_feature (183)..(183): Ser or Pro or Thr or Cys
  misc_feature (184)..(184): Leu or Ser or Ala or Gly
  misc_feature (185)..(185): Val or Met or Gln or Lys or Ile or Arg
  misc_feature (186)..(186): Ser or Arg or Lys
  misc_feature (187)..(187): Val or Ser or Leu or Absent
  misc_feature (188)..(188): Glu or Absent or Arg
  misc_feature (189)..(189): Arg or Absent or Pro
  misc_feature (190)..(190): Tyr or Absent or Ala
  misc_feature (191)..(191): Leu or Absent or Lys
  misc_feature (192)..(192): Arg or Absent or Asp
  misc_feature (193)..(193): Glu or Absent
  misc_feature (194)..(194): Ser or Absent
  misc_feature (195)..(195): Arg or Absent
  misc_feature (196)..(196): Asn or Absent
  misc_feature (197)..(197): Ser or Absent
  misc_feature (198)..(198): Ile or Absent
  misc_feature (199)..(199): Glu or Absent
  misc_feature (200)..(200): Gln or Absent
  misc_feature (201)..(201): Gln or Absent
  misc_feature (202)..(202): Leu or Absent
  misc_feature (203)..(203): Arg or Absent
  misc_feature (204)..(204): Val or Absent
  misc_feature (205)..(205): Leu or Absent
  misc_feature (206)..(206): Gln or Absent
  misc_feature (207)..(207): Asn or Absent
  misc_feature (208)..(208): Arg or Absent
  misc_feature (209)..(209): Arg or Absent
  misc_feature (210)..(210): Gly or Absent
  misc_feature (211)..(211): His or Absent
  misc_feature (212)..(212): Ser or Absent
  misc_feature (213)..(213): Lys or Absent
  misc_feature (214)..(214): Asp or Absent
  misc_feature (215)..(215): Phe or Absent
  misc_feature (216)..(216): Arg or Absent
  misc_feature (217)..(217): Leu or Absent
  misc_feature (218)..(218): Pro or Absent
  misc_feature (219)..(219): Asp or Absent
  misc_feature (220)..(220): Gly or Absent
  misc_feature (221)..(221): Trp or Absent
  misc_feature (222)..(222): Ile or Absent
  misc_feature (223)..(223): Val or Tyr or Phe or Gly or Asp
  misc_feature (224)..(224): Glu or Arg or Gln or Leu
  misc_feature (225)..(225): Glu or Asn or Gly or Lys or Arg
  misc_feature (226)..(226): Lys or Pro or Arg or Ala or His or Tyr
  misc_feature (227)..(227): Pro or Val or Leu
  misc_feature (228)..(228): Arg or Glu or Ser or His or Ile or Thr
  misc_feature (229)..(229): Arg or Lys or Phe or Glu
  misc_feature (230)..(230): Ser or Arg or Gly or Ala
  misc_feature (231)..(231): Ser or Phe or Ala or Asn or Lys
  misc_feature (232)..(232): Ser or Glu or Absent or Ile
  misc_feature (233)..(233): His or Asp or Asn or Ala or Val or Absent or Tyr
  misc_feature (234)..(234): Ile or Ala or Gly or Asp or Glu
  misc_feature (235)..(235): Asp or Glu or Cys or Ala
  misc_feature (236)..(236): Arg or Asp or Glu or Thr
  misc_feature (237)..(237): Ser or Gln or Ala or Lys or Val or His or Pro or Leu
  misc_feature (238)..(238): Tyr or Thr or Absent or Gln or Lys or Glu
  misc_feature (239)..(239): Ile or Absent or Pro
  misc_feature (240)..(240): Glu or Absent or Lys
  misc_feature (241)..(241): Pro or Absent or Leu
  misc_feature (242)..(242): Gly or Absent
  misc_feature (243)..(243): Thr or Absent
  misc_feature (244)..(244): Gly or Absent
  misc_feature (245)..(245): Asn or Absent
  misc_feature (246)..(246): Lys or Absent
  misc_feature (247)..(247): Phe or Absent
  misc_feature (248)..(248): Arg or Absent
  misc_feature (249)..(249): Ser or Absent
  misc_feature (250)..(250): Met or Absent
  misc_feature (251)..(251): Ala or Absent
  misc_feature (252)..(252): Ala or Absent
  misc_feature (253)..(253): Val or Absent
  misc_feature (254)..(254): Glu or Absent
  misc_feature (255)..(255): Arg or Absent or Val
  misc_feature (256)..(256): Tyr or Absent or Phe or Met or Ile
  misc_feature (257)..(257): Leu or Absent or Lys or Thr
  misc_feature (258)..(258): Ile or Absent or Cys or Pro
  misc_feature (259)..(259): Ser or Absent or Gly or Lys
  misc_feature (260)..(260): Val or Thr or Ser or Tyr or Pro or Ala
  misc_feature (261)..(261): Gly or Pro or Leu or Ser
  misc_feature (262)..(262): Asn or Glu or Lys or Gln or Thr
  misc_feature (263)..(263): Ile or Pro or Lys or His or Asn or Ala
  misc_feature (264)..(264): Thr or Ser or Gly
  misc_feature (265)..(265): Leu or Ile or Ala or Asp or Lys
  misc_feature (266)..(266): Asp or Gln or Pro or Ala or Glu or Asn
  misc_feature (268)..(268): Val or Thr or Ile or Ala or Lys or Leu
  misc_feature (269)..(269): Ser or Asp or Leu or Lys or Thr or Pro
  misc_feature (270)..(270): Met or Ser or Tyr or Pro or Asn or Thr
  misc_feature (271)..(271): Val or Glu or Lys or Asn or His
  misc_feature (272)..(272): His or Ile or Glu or Lys or Ser
  misc_feature (273)..(273): Ser or Thr or Asn or Pro or Ala
  misc_feature (274)..(274): Glu or Asp or Thr or Leu or Ser
  misc_feature (276)..(276): Leu or Gln or Arg or Absent
  misc_feature (278)..(278): Leu or Lys or Absent or Glu
  misc_feature (279)..(279): Leu or Ile or Thr or Absent or His
  misc_feature (280)..(280): Met or Lys or Absent or Thr or Val
  misc_feature (281)..(281): Asn or Thr or Ile or Leu or Ser or Absent
  misc_feature (282)..(282): Arg or Gly or Glu or Absent
  misc_feature (283)..(283): Asn or Glu or Lys or Absent
  misc_feature (284)..(284): Gly or Asp or Absent or Lys
  misc_feature (285)..(285): Ile or Asp or Asn or Val
  misc_feature (286)..(286): Arg or Gly or Lys or Glu
  misc_feature (287)..(287): Phe or Gly or Ala or Thr
  misc_feature (289)..(289): Ser or Ile or Met or Thr or Leu
  misc_feature (290)..(290): Glu or His or Ser or Val or Leu
  misc_feature (291)..(291): Val or Asn or His or Asp
  misc_feature (293)..(293): Asp or Thr or Ala or Ile or His or Ser
  misc_feature (294)..(294): Pro or Lys or Arg or Ala or Val or Asn or Ser
  misc_feature (297)..(297): Pro or Absent
  misc_feature (298)..(298): Lys or Thr or Ala or Val
  misc_feature (301)..(301): Lys or Ser or Asn
  misc_feature (307)..(307): Ser or Pro
  misc_feature (310)..(310): Asn or Absent or Asp or Ile
  misc_feature (311)..(311): Met or Phe or Val or Ala
  misc_feature (315)..(315): Asn or Phe or Ser or Tyr or Leu
  misc_feature (316)..(316): Val or Leu or Ile or Met
  misc_feature (320)..(320): Asn or Ile or Val or Ala or Arg or Leu
  misc_feature (324)..(324): Leu or Ser or Pro or Phe
  misc_feature (325)..(325): Val or Glu or Ile
  misc_feature (327)..(327): His or Thr or Arg or Leu or Met or Gln
  misc_feature (331)..(331): Glu or Lys
  misc_feature (332)..(332): Ala or Thr or Ile
  misc_feature (335)..(335): Ser or Asn or Ile or Leu or Trp or Phe
  misc_feature (336)..(336): Leu or Ile or Ser or His or Thr
  misc_feature (338)..(338): Glu or Gln or Asn or His or Ile
  misc_feature (339)..(339): Asp or Absent or Glu or Asn or Tyr
  misc_feature (340)..(340): Arg or Absent or Gly or Asp or Lys
  misc_feature (341)..(341): Ser or Absent or Ala or Gly or Phe or Leu
  misc_feature (342)..(342): Absent or Thr or Val or Asp
  misc_feature (343)..(343): Absent or Ser or Thr or Ile
  misc_feature (344)..(344): Absent or Gly or Asn
  misc_feature (345)..(345): Absent or Val or Ser or Gly
  misc_feature (346)..(346): Absent or Asn or Leu
  misc_feature (347)..(347): Absent or Asn
  misc_feature (348)..(348): Absent or Ser
  unsure (1)..(348): unsure at all Xaa locations
XXXXXXXXXXXXXXXXXXXXXXXXXXXXXXXXXXXXXXXXXXXXXXXXXXXXXXXXXXXXXXXXXXXXXXXXXXYYXEPXTGXXFRSLXSXXXXLXGXXXXXXXXXXXXXXXXXXXXXXXXXXXXXXXXXXXXXXXXXXXXXXXXXXXXXXXXXXXXXXXXXXXXXXXXKXXXXXGTGXXXXXXXXXXXXXXXXXXXXXXXXXXXXXXXXXXXXXXXXXXXXXXXXXXXXXXXXXXXXXXXXXXXXXXXXXXXXXXXXXXXXXXXXSXXXXXXXSXKXXXXXXXXXXSXXXLXXPPXXKVXWVLSGXGGXXWSPXXDDSXVPEXXKXKWSXXFVXXIXXXXXXXXXXX

SEQ ID NO: 36455 - protein, 557 aa, Artificial sequence
  consensus sequence of seq id no: 383  and its homologs
  misc_feature (3)..(3): Ser or Absent or Tyr or Thr
  misc_feature (5)..(5): Val or Absent or Phe
  misc_feature (6)..(6): Phe or Absent or Tyr
  misc_feature (7)..(7): Gly or Absent or Ala or Arg
  misc_feature (8)..(8): Ser or Absent or Asn
  misc_feature (9)..(9): Gln or Absent or Arg
  misc_feature (10)..(10): Trp or Absent or Phe
  misc_feature (11)..(11): Asn or Absent or Gly
  misc_feature (12)..(12): Absent or Tyr
  misc_feature (13)..(13): Absent or Pro
  misc_feature (14)..(14): Absent or Gln
  misc_feature (15)..(15): Absent or Ser
  misc_feature (16)..(16): Absent or Ser
  misc_feature (17)..(17): Absent or Arg
  misc_feature (18)..(18): Absent or Tyr
  misc_feature (19)..(19): Leu or Absent or Tyr
  misc_feature (20)..(20): Pro or Absent or Asp or Ile
  misc_feature (21)..(21): Ser or Absent or His
  misc_feature (22)..(22): Arg or Absent or His
  misc_feature (23)..(23): Thr or Absent or His or Asn
  misc_feature (24)..(24): Arg or Absent or Ser or Tyr
  misc_feature (25)..(25): Arg or Absent or Pro
  misc_feature (26)..(26): Tyr or Absent or Ser
  misc_feature (27)..(27): Pro or Absent or Ser
  misc_feature (28)..(28): Ala or Absent or Ser
  misc_feature (29)..(29): Thr or Absent or Lys or Pro
  misc_feature (30)..(30): Arg or Absent or Gln
  misc_feature (31)..(31): Gln or Absent or Val or Ile
  misc_feature (32)..(32): Val or Absent or Pro
  misc_feature (33)..(33): Pro or Absent or Val
  misc_feature (34)..(34): Val or Absent or Asp or His
  misc_feature (37)..(37): Gln or Absent or Thr
  misc_feature (38)..(38): Met or Absent or Pro or Thr
  misc_feature (39)..(39): Pro or Absent or Thr
  misc_feature (40)..(40): Val or Absent
  misc_feature (41)..(41): Pro or Absent or Leu
  misc_feature (42)..(42): Ser or Absent or Pro
  misc_feature (43)..(43): Pro or Absent or Cys or Lys
  misc_feature (47)..(47): Ser or Absent or Met
  misc_feature (51)..(51): His or Absent or Thr or Arg
  misc_feature (52)..(52): Absent or Asp
  misc_feature (53)..(53): Absent or Gly
  misc_feature (54)..(54): Absent or Ser
  misc_feature (55)..(55): Absent or Glu
  misc_feature (56)..(56): Absent or Arg
  misc_feature (57)..(57): Absent or Gln
  misc_feature (58)..(58): Absent or Leu
  misc_feature (59)..(59): Absent or Pro
  misc_feature (60)..(60): Absent or Leu
  misc_feature (61)..(61): Phe or Absent or Pro or Tyr
  misc_feature (62)..(62): Val or Absent or Leu
  misc_feature (63)..(63): Gly or Met
  misc_feature (66)..(66): Arg or Glu
  misc_feature (67)..(67): Thr or Ser
  misc_feature (69)..(69): Ser or Absent or Leu
  misc_feature (70)..(70): Ala or Absent or Asp or Glu
  misc_feature (71)..(71): Ser or Absent or Gly
  misc_feature (73)..(73): Val or Ile
  misc_feature (74)..(74): Lys or Gly or Asn
  misc_feature (83)..(83): Leu or Absent or Met
  misc_feature (87)..(87): Asn or Val or Ser
  misc_feature (88)..(88): Met or Val
  misc_feature (92)..(92): Val or Gly or Leu
  misc_feature (93)..(93): Ala or Glu
  misc_feature (94)..(94): Val or Ile or Thr
  misc_feature (96)..(96): Arg or Cys or Ser
  misc_feature (98)..(98): Ile or Glu or Val
  misc_feature (101)..(101): Val or Glu or Ile
  misc_feature (103)..(103): Arg or Gly or Lys
  misc_feature (104)..(104): Arg or Absent
  misc_feature (106)..(106): Ser or Absent or Leu
  misc_feature (107)..(107): Arg or Absent or Met
  misc_feature (108)..(108): Glu or Absent or Ser or Lys
  misc_feature (110)..(110): Ile or Glu or Thr
  misc_feature (111)..(111): Val or Ile or Arg
  misc_feature (113)..(113): Met or Ala or Leu
  misc_feature (114)..(114): Ile or Leu or Met
  misc_feature (116)..(116): Arg or Asn or Lys
  misc_feature (118)..(118): Ser or Glu or Gln
  misc_feature (121)..(121): Arg or Absent or Lys
  misc_feature (124)..(124): Val or Absent or Ile
  misc_feature (127)..(127): Thr or Absent or Met
  misc_feature (130)..(130): Ser or Absent or Arg
  misc_feature (134)..(134): Arg or Absent or Lys
  misc_feature (148)..(148): Cys or Absent or Leu
  misc_feature (150)..(150): Lys or Absent or Arg
  misc_feature (154)..(154): Arg or Absent or Lys
  misc_feature (155)..(155): Arg or Absent or Lys
  misc_feature (156)..(156): Ala or Absent or Val
  misc_feature (158)..(158): Ala or Absent or Lys
  misc_feature (162)..(162): Lys or Absent or Leu or Thr
  misc_feature (165)..(165): Ala or Absent or Ser
  misc_feature (167)..(167): Ala or Absent or Val
  misc_feature (169)..(169): Ser or Absent or Asn or Ala
  misc_feature (170)..(170): Asp or Absent or Asn or Ala
  misc_feature (171)..(171): Gln or Absent or Val or Asn
  misc_feature (172)..(172): Thr or Absent or Ala or Gly
  misc_feature (173)..(173): Val or Absent or Lys or Asp
  misc_feature (175)..(175): Ser or Absent
  misc_feature (176)..(176): Absent or Val
  misc_feature (177)..(177): Absent or Val
  misc_feature (178)..(178): Absent or Ser
  misc_feature (179)..(179): Absent or Ala
  misc_feature (180)..(180): Absent or Gly
  misc_feature (181)..(181): Absent or Glu
  misc_feature (182)..(182): Absent or Lys
  misc_feature (183)..(183): Absent or Gly
  misc_feature (184)..(184): Absent or Val
  misc_feature (185)..(185): Absent or Asp
  misc_feature (186)..(186): Absent or Glu
  misc_feature (187)..(187): Absent or Thr
  misc_feature (188)..(188): Absent or Gly
  misc_feature (189)..(189): Absent or Glu
  misc_feature (190)..(190): Absent or Gly
  misc_feature (191)..(191): Absent or Glu
  misc_feature (192)..(192): Absent or Glu
  misc_feature (193)..(193): Absent or Glu
  misc_feature (194)..(194): Absent or Asn
  misc_feature (195)..(195): Absent or Gly
  misc_feature (196)..(196): Absent or Ser
  misc_feature (197)..(197): Absent or Val
  misc_feature (198)..(198): Absent or Ala
  misc_feature (199)..(199): Absent or Asn
  misc_feature (200)..(200): Absent or Ala
  misc_feature (201)..(201): Glu or Absent or Ala
  misc_feature (202)..(202): Thr or Absent or Glu or Asp
  misc_feature (203)..(203): His or Absent or Asp or Glu
  misc_feature (204)..(204): Thr or Absent or Leu
  misc_feature (205)..(205): Glu or Absent or Ala or Gln
  misc_feature (206)..(206): Thr or Absent or Asn
  misc_feature (207)..(207): Ser or Absent or Gln or Gly
  misc_feature (208)..(208): Asp or Absent or Thr or Ala
  misc_feature (209)..(209): Pro or Absent or Leu or Ala
  misc_feature (210)..(210): Ser or Absent or Glu
  misc_feature (211)..(211): Ser or Absent or Thr
  misc_feature (212)..(212): Glu or Absent or Thr
  misc_feature (213)..(213): Leu or Absent or Asp or Ala
  misc_feature (214)..(214): Ile or Absent or Val
  misc_feature (215)..(215): Asp or Absent or Pro or Val
  misc_feature (216)..(216): Gly or Absent or Pro or Ser
  misc_feature (217)..(217): Ser or Absent or Asn or Met
  misc_feature (218)..(218): Arg or Absent or Val or Leu
  misc_feature (219)..(219): Ser or Absent or Glu or Ala
  misc_feature (220)..(220): Glu or Absent or Asp
  misc_feature (221)..(221): Ala or Absent or Ser
  misc_feature (222)..(222): Val or Absent or Ser or Arg
  misc_feature (223)..(223): Asp or Absent or Phe or Glu
  misc_feature (224)..(224): Gly or Absent or Asn or Thr
  misc_feature (225)..(225): Ile or Absent or Ser or Arg
  misc_feature (226)..(226): Gln or Absent or Asn or Glu
  misc_feature (227)..(227): Glu or Absent or Asn
  misc_feature (228)..(228): Leu or Absent or Phe
  misc_feature (229)..(229): Ser or Absent or Glu or Asn
  misc_feature (230)..(230): Val or Absent or Asn or Gly
  misc_feature (231)..(231): Asp or Absent or Ala
  misc_feature (232)..(232): Cys or Absent or Val or Leu
  misc_feature (233)..(233): Asp or Absent or Asn or Glu
  misc_feature (234)..(234): Ser or Absent or Gln or Asn
  misc_feature (235)..(235): Ala or Absent or Thr or Val
  misc_feature (236)..(236): Ala or Absent or Gln or Asp
  misc_feature (237)..(237): Asp or Absent or Asn or Met
  misc_feature (238)..(238): Glu or Absent or Ala
  misc_feature (239)..(239): Thr or Absent or Ser
  misc_feature (240)..(240): Leu or Absent or Glu
  misc_feature (241)..(241): Glu or Absent or Gly
  misc_feature (242)..(242): Ile or Absent or Glu
  misc_feature (243)..(243): Lys or Absent or Arg
  misc_feature (244)..(244): Asp or Absent or Asn
  misc_feature (245)..(245): Ser or Absent or Val
  misc_feature (246)..(246): Ile or Absent or Glu
  misc_feature (247)..(247): Cys or Absent
  misc_feature (248)..(248): Glu or Absent or Asp
  misc_feature (249)..(249): Tyr or Absent or Gly
  misc_feature (250)..(250): Ser or Absent or Asp
  misc_feature (251)..(251): Ala or Absent or Val
  misc_feature (252)..(252): Asn or Absent or Pro
  misc_feature (253)..(253): Gly or Absent or Thr
  misc_feature (254)..(254): Ala or Absent or Ser
  misc_feature (255)..(255): Leu or Absent or Met
  misc_feature (256)..(256): Glu or Absent or Ser
  misc_feature (257)..(257): Thr or Absent or Asp
  misc_feature (258)..(258): Ala or Absent or Tyr
  misc_feature (259)..(259): Pro or Absent or Cys
  misc_feature (260)..(260): Asp or Absent
  misc_feature (261)..(261): Pro or Absent or Ser
  misc_feature (262)..(262): Ala or Absent or Val
  misc_feature (263)..(263): Val or Absent or His or Arg
  misc_feature (264)..(264): Val or Absent or Ala or Gly
  misc_feature (265)..(265): Ser or Absent or Val
  misc_feature (267)..(267): Asp or Absent or Ser
  misc_feature (268)..(268): Cys or Absent or Gly
  misc_feature (269)..(269): Asn or Absent or Val
  misc_feature (270)..(270): Val or Absent or Gly
  misc_feature (271)..(271): Asp or Absent
  misc_feature (272)..(272): Gly or Absent or Cys
  misc_feature (273)..(273): Absent or Arg
  misc_feature (274)..(274): Absent or Glu
  misc_feature (275)..(275): Absent or Ala
  misc_feature (276)..(276): Absent or Val
  misc_feature (277)..(277): Absent or Ile
  misc_feature (278)..(278): Absent or Lys
  misc_feature (279)..(279): Absent or Lys
  misc_feature (280)..(280): Ala or Absent
  misc_feature (281)..(281): Leu or Absent or Ile
  misc_feature (282)..(282): Gln or Absent or Ala
  misc_feature (283)..(283): Leu or Absent
  misc_feature (284)..(284): Gln or Absent
  misc_feature (285)..(285): Asn or Absent or Glu
  misc_feature (286)..(286): Pro or Absent or Thr
  misc_feature (287)..(287): Val or Absent or Cys
  misc_feature (288)..(288): Glu or Absent or Asp
  misc_feature (289)..(289): His or Absent or Cys or Ser
  misc_feature (290)..(290): Val or Absent or Ile
  misc_feature (291)..(291): Ile or Absent or Ser or Ala
  misc_feature (292)..(292): Asp or Absent or Asn or Ala
  misc_feature (293)..(293): Ser or Absent or Val or Ala
  misc_feature (294)..(294): Gly or Absent or Ser or Ala
  misc_feature (295)..(295): Asp or Absent or Lys or Asn
  misc_feature (296)..(296): Ser or Absent or Glu or Gly
  misc_feature (297)..(297): Lys or Absent or Glu or Asp
  misc_feature (298)..(298): Val or Absent or Asp
  misc_feature (299)..(299): Met or Absent or Ser
  misc_feature (300)..(300): Ser or Absent or Val
  misc_feature (301)..(301): Glu or Absent or Val
  misc_feature (302)..(302): Ser or Absent
  misc_feature (303)..(303): Thr or Absent or Ala
  misc_feature (304)..(304): Leu or Absent or Gly
  misc_feature (305)..(305): Asp or Absent or Glu
  misc_feature (306)..(306): Cys or Absent or Lys
  misc_feature (307)..(307): Cys or Absent or Gly
  misc_feature (308)..(308): Val or Absent
  misc_feature (309)..(309): Asp or Absent
  misc_feature (310)..(310): Ser or Absent or Glu
  misc_feature (311)..(311): Ala or Absent or Thr
  misc_feature (312)..(312): Asp or Absent or Gly
  misc_feature (314)..(314): Ser or Absent or Gly
  misc_feature (315)..(315): Lys or Absent or Glu
  misc_feature (318)..(318): Met or Absent or Ala or Asp
  misc_feature (319)..(319): Asp or Absent or Ala or Gly
  misc_feature (320)..(320): Val or Absent or Ala or Ser
  misc_feature (321)..(321): Thr or Absent or Pro or Val
  misc_feature (322)..(322): Glu or Absent or Ala
  misc_feature (323)..(323): Ile or Absent or Asn
  misc_feature (324)..(324): Gly or Absent or Ala
  misc_feature (325)..(325): Val or Absent or Ala
  misc_feature (326)..(326): Asp or Absent
  misc_feature (327)..(327): Ser or Absent or Glu
  misc_feature (328)..(328): Glu or Absent or Leu
  misc_feature (329)..(329): Ile or Absent or Gln
  misc_feature (330)..(330): Asn or Absent
  misc_feature (331)..(331): Absent or Gly
  misc_feature (332)..(332): Absent or Ala
  misc_feature (333)..(333): Absent or Ala
  misc_feature (334)..(334): Absent or Glu
  misc_feature (335)..(335): Absent or Ser
  misc_feature (336)..(336): Absent or Glu
  misc_feature (337)..(337): Absent or Ala
  misc_feature (338)..(338): Absent or Val
  misc_feature (339)..(339): Absent or Val
  misc_feature (340)..(340): Absent or Ser
  misc_feature (341)..(341): Absent or Val
  misc_feature (342)..(342): Absent or Leu
  misc_feature (343)..(343): Absent or Ala
  misc_feature (344)..(344): Absent or Asp
  misc_feature (345)..(345): Absent or Ser
  misc_feature (346)..(346): Absent or Arg
  misc_feature (347)..(347): Absent or Glu
  misc_feature (348)..(348): Ala or Absent
  misc_feature (349)..(349): Asn or Absent or Arg
  misc_feature (350)..(350): Lys or Absent or Glu
  misc_feature (351)..(351): Asp or Absent or Glu
  misc_feature (352)..(352): Val or Absent or Leu or Phe
  misc_feature (353)..(353): Ser or Absent or Thr or Asn
  misc_feature (354)..(354): Thr or Absent or Ala or Gly
  misc_feature (355)..(355): Pro or Absent or Ile or Thr
  misc_feature (356)..(356): Lys or Arg or Leu
  misc_feature (358)..(358): Thr or Gly or Asn
  misc_feature (360)..(360): Glu or Gly or Asp
  misc_feature (361)..(361): Asp or Thr or Val or Met
  misc_feature (362)..(362): Pro or Ser or Ala
  misc_feature (363)..(363): Asp or Absent or Ser
  misc_feature (364)..(364): Asp or Absent or Glu
  misc_feature (365)..(365): Ser or Absent or Gly
  misc_feature (366)..(366): Lys or Absent or Glu
  misc_feature (367)..(367): Absent or Arg
  misc_feature (368)..(368): Absent or Lys
  misc_feature (369)..(369): Absent or Val
  misc_feature (370)..(370): Absent or Glu
  misc_feature (371)..(371): Absent or Cys
  misc_feature (372)..(372): Absent or Asp
  misc_feature (373)..(373): Absent or Gly
  misc_feature (374)..(374): Absent or Asp
  misc_feature (375)..(375): Absent or Val
  misc_feature (376)..(376): Absent or Pro
  misc_feature (377)..(377): Absent or Thr
  misc_feature (378)..(378): Absent or Leu
  misc_feature (379)..(379): Absent or Met
  misc_feature (380)..(380): Absent or Ser
  misc_feature (381)..(381): Absent or Asp
  misc_feature (382)..(382): Absent or Tyr
  misc_feature (383)..(383): Absent or Cys
  misc_feature (384)..(384): Absent or Glu
  misc_feature (385)..(385): Absent or Pro
  misc_feature (386)..(386): Absent or Glu
  misc_feature (387)..(387): Absent or Arg
  misc_feature (388)..(388): Absent or Val
  misc_feature (389)..(389): Absent or Leu
  misc_feature (390)..(390): Absent or Glu
  misc_feature (391)..(391): Absent or Val
  misc_feature (392)..(392): Ala or Absent or Val
  misc_feature (393)..(393): Leu or Absent or Asn
  misc_feature (394)..(394): Pro or Absent or Glu
  misc_feature (395)..(395): Arg or Absent or Cys or Thr
  misc_feature (396)..(396): Ser or Absent or Met or Val
  misc_feature (397)..(397): Ser or Absent or Glu
  misc_feature (398)..(398): Pro or Absent or Met or Leu
  misc_feature (399)..(399): Asp or Absent or Ser or Lys
  misc_feature (400)..(400): Ser or Absent or Glu
  misc_feature (401)..(401): Cys or Absent or Ser or Ala
  misc_feature (402)..(402): Asp or Absent or Ser or Glu
  misc_feature (403)..(403): Asp or Absent or Gly or Asn
  misc_feature (404)..(404): Ser or Absent or Asp
  misc_feature (405)..(405): Val or Absent or Glu
  misc_feature (406)..(406): His or Absent or Ser or Thr
  misc_feature (407)..(407): Glu or Absent or Ser or Ala
  misc_feature (408)..(408): Ile or Absent or Cys
  misc_feature (409)..(409): Lys or Absent or Gln
  misc_feature (410)..(410): Glu or Absent or Gly
  misc_feature (411)..(411): Asp or Absent or Glu
  misc_feature (412)..(412): Val or Absent or Ser or Asp
  misc_feature (413)..(413): Asp or Absent or Arg
  misc_feature (414)..(414): Val or Absent or Asp
  misc_feature (415)..(415): Ala or Absent or Leu
  misc_feature (416)..(416): Glu or Absent
  misc_feature (417)..(417): Val or Absent or Lys
  misc_feature (418)..(418): Ile or Absent or Gln
  misc_feature (419)..(419): Asp or Absent or Val
  misc_feature (420)..(420): Glu or Absent or Asp
  misc_feature (421)..(421): Ile or Absent or Lys
  misc_feature (422)..(422): Lys or Absent or Asp
  misc_feature (423)..(423): Glu or Absent or Gly
  misc_feature (424)..(424): Asp or Absent
  misc_feature (425)..(425): Met or Absent or Cys
  misc_feature (426)..(426): Asp or Absent or Met
  misc_feature (427)..(427): Val or Absent or Gly
  misc_feature (428)..(428): Thr or Absent
  misc_feature (429)..(429): Glu or Absent or Ser
  misc_feature (430)..(430): Val or Absent or Gln
  misc_feature (431)..(431): Gly or Absent or Thr
  misc_feature (432)..(432): Val or Absent or Glu
  misc_feature (434)..(434): Ser or Val or Gln
  misc_feature (435)..(435): Glu or Ala or Ser
  misc_feature (436)..(436): Ile or Glu or Asp
  misc_feature (437)..(437): Asn or Ser
  misc_feature (438)..(438): Ala or Cys or Ser
  misc_feature (439)..(439): Asn or Leu or Asp or Ala
  misc_feature (440)..(440): Glu or Met or Ser
  misc_feature (441)..(441): Glu or Lys or Leu
  misc_feature (442)..(442): Ala or Glu or Met
  misc_feature (443)..(443): Tyr or Glu or Lys
  misc_feature (444)..(444): Ala or Gly or Gln
  misc_feature (445)..(445): Pro or Gly or Asp
  misc_feature (447)..(447): Glu or Tyr or Asp
  misc_feature (449)..(449): Val or Arg or Lys or Glu
  misc_feature (451)..(451): Asp or Glu or Val
  misc_feature (452)..(452): Pro or Gly or His
  misc_feature (453)..(453): Ser or Asp
  misc_feature (454)..(454): Ser or Gly or Asn
  misc_feature (455)..(455): Asn or Absent or Glu or Gly
  misc_feature (456)..(456): Pro or Absent or Lys or Val
  misc_feature (457)..(457): Arg or Absent or Asp or Glu
  misc_feature (458)..(458): Val or Absent or Gln or Ile
  misc_feature (459)..(459): Asn or Absent or Asp or Glu
  misc_feature (460)..(460): Glu or Absent or Gln or Lys
  misc_feature (461)..(461): Cys or Absent or Phe or Lys
  misc_feature (462)..(462): Ala or Absent or Cys or Gly
  misc_feature (463)..(463): Gly or Absent or Asp
  misc_feature (464)..(464): Val or Absent or Gly or Glu
  misc_feature (465)..(465): Glu or Absent or Gly
  misc_feature (466)..(466): Gly or Absent or Glu
  misc_feature (467)..(467): Asn or Absent or Val
  misc_feature (468)..(468): Gln or Absent or Lys
  misc_feature (469)..(469): Glu or Absent or Ser
  misc_feature (470)..(470): His or Absent or Glu or Asn
  misc_feature (471)..(471): Gly or Absent or Met or Asp
  misc_feature (472)..(472): Lys or Absent or Ala or Glu
  misc_feature (473)..(473): Glu or Absent or Val or Ser
  misc_feature (474)..(474): Asp or Absent or Cys or Thr
  misc_feature (475)..(475): Gln or Absent or Arg
  misc_feature (476)..(476): Ser or Lys or Arg
  misc_feature (477)..(477): Asn or Lys or Ser or Gly
  misc_feature (478)..(478): Gly or Lys or Arg
  misc_feature (489)..(489): Ala or Gln or Glu
  misc_feature (493)..(493): Cys or Glu or Gly
  misc_feature (497)..(497): Lys or Gln or Glu
  misc_feature (500)..(500): Glu or Gln
  misc_feature (523)..(523): Ile or Leu or Phe or Tyr
  misc_feature (524)..(524): Met or Ala or Ile
  misc_feature (527)..(527): Lys or Arg or Gln
  misc_feature (531)..(531): Absent or Lys or Ser or Arg
  misc_feature (534)..(534): Arg or Lys
  misc_feature (535)..(535): Gln or Lys or Arg
  misc_feature (536)..(536): Ala or His or Asn
  misc_feature (537)..(537): Ala or Asp or Ser
  misc_feature (540)..(540): Gln or Ile or Leu
  misc_feature (541)..(541): Glu or Lys or Ala or Leu
  misc_feature (542)..(542): Ala or Arg or Asp
  misc_feature (543)..(543): Ser or Asn or Cys
  misc_feature (544)..(544): Pro or Asn or Leu
  misc_feature (545)..(545): Asp or Pro or Glu
  misc_feature (546)..(546): Ala or Lys or Ser
  misc_feature (547)..(547): Lys or Asn or Thr
  misc_feature (548)..(548): Lys or Gly or Gln or Pro
  misc_feature (549)..(549): Cys or Phe or Asp or Absent
  misc_feature (550)..(550): Gly or Ile or Cys or Absent
  misc_feature (553)..(553): Leu or Absent or Ser
  misc_feature (554)..(554): Absent or Ser
  misc_feature (555)..(555): Absent or Gly
  misc_feature (556)..(556): Absent or Lys
  misc_feature (557)..(557): Absent or Arg
  unsure (1)..(557): unsure at all Xaa locations
MDXPXXXXXXXXXXXXXXXXXXXXXXXXXXXXXXHRXXXXXXXKVVXIPVXXXXXXXXXXXXXSEXXRXXXAXXIQKVFRGFXVRKXXKKIXXXKXEXDEXEXXIXXXEXXEXXRXDXKEXLKXNEXLMXLLLXLDSVRGVDSGVRDXRXAVIXXXIXLQEXVDXIXAXXXXXDXXXXXXXXXXXXXXXXXXXXXXXXXXXXXXXXXXXXXXXXXXXXXXXXXXXXXXXXXXXXXXXXXXXXXXXXXXXXXXXXXXXXXXXXXXXDXXXXXXXXXXXXXXXXXXXXXXXXXXXXXXXXXXXXXXXXXXXXXXEXXEEXXXXXXXXXXXXXXXXXXXXXXXXXXXXXXXXXXXXXXXEXVXXXXXXXXXXXXXXXXXXXXXXXXXXXXXXXXXXXXXXXXXXXXXXXXXXXXXXXXXXXXXXXXXXXXXXXXXSXXXXXXXXXXXXDXEXEXXXXXXXXXXXXXXXXXXXXXXXXXXXXELLEKMMEDNXKMMXLMTXLFXRNEMQTRLLSSLSQRVEQLERAXXCEXLRRXKKXXXXAGXXXXXXXXXXXKKXXXXX

SEQ ID NO: 36456 - protein, 673 aa, Artificial sequence
  consensus sequence of seq id no: 384  and its homologs
  misc_feature (1)..(1): Absent or Met
  misc_feature (2)..(2): Absent or Ala
  misc_feature (3)..(3): Absent or Met
  misc_feature (4)..(4): Absent or Val or Ala or Met
  misc_feature (5)..(5): Absent or Thr or Met or Ala
  misc_feature (6)..(6): Absent or Thr or Ala
  misc_feature (7)..(7): Absent or Ser or Thr
  misc_feature (8)..(8): Absent or Pro or Thr or Ile
  misc_feature (9)..(9): Absent or Met or Ala or Ser or Pro
  misc_feature (10)..(10): Absent or Ala or Thr or Pro
  misc_feature (11)..(11): Absent or Met or Ala or His or Leu or Ser
  misc_feature (12)..(12): Absent or Ala or Ser or Thr or Gln or Pro
  misc_feature (13)..(13): Absent or Ser or Thr or Ala or Pro or Val
  misc_feature (14)..(14): Absent or Thr or Ser or Gln
  misc_feature (15)..(15): Absent or Ser or Pro or Leu
  misc_feature (16)..(16): Absent or Thr or Asn or Ser or Gln
  misc_feature (17)..(17): Absent or Met or Ser or Leu or Phe or Ile or Pro
  misc_feature (18)..(18): Absent or Pro or Ser or Thr or Cys or Tyr
  misc_feature (19)..(19): Absent or Ala or Leu or Thr or Lys
  misc_feature (20)..(20): Absent or Ile or Met or Pro or Ser or Gln or His or Lys
  misc_feature (21)..(21): Absent or Phe or Ala or Leu or Asn or Thr
  misc_feature (22)..(22): Absent or Val or Ser or Gln or His or Asn
  misc_feature (23)..(23): Absent or Arg or Lys or Val or Ser
  misc_feature (24)..(24): Absent or Ser or Thr or Asn or Pro or Gly
  misc_feature (25)..(25): Absent or Ser or Val or Ala or Asn
  misc_feature (26)..(26): Absent or Ser or Ile or Arg or His or Thr or Ala or Met
  misc_feature (27)..(27): Absent or Ser or Lys or Arg or Leu
  misc_feature (28)..(28): Absent or Ser or Lys or Thr or Phe or Cys or Ile
  misc_feature (29)..(29): Absent or Ser or Thr or Gly or Lys or Cys or Arg
  misc_feature (30)..(30): Absent or Ser or Ala or Phe or Pro
  misc_feature (31)..(31): Absent or Thr or Leu or Pro or Ala
  misc_feature (32)..(32): Absent or Phe or Ser or Pro
  misc_feature (33)..(33): Absent or Ile or Ser or Leu or Pro or Arg
  misc_feature (34)..(34): Absent or Ser or Pro or Leu or Thr
  misc_feature (35)..(35): Absent or Thr or Leu or Val or Gly or Pro or Trp
  misc_feature (36)..(36): Absent or Thr or Pro or Lys or Leu or Arg
  misc_feature (37)..(37): Absent or Asp or Gly or Lys or Leu or Arg
  misc_feature (38)..(38): Absent or Met or Val or Ile or Pro or Thr or Ser or Leu or Arg
  misc_feature (39)..(39): Absent or Ile or Phe or Val or Leu or Trp
  misc_feature (40)..(40): Absent or Ile or Thr or Ser or His or Gln or Lys or Pro
  misc_feature (41)..(41): Absent or Glu or Asn or Arg or Ala or Thr or Trp or Gln
  misc_feature (42)..(42): Absent or Ser or Asn or Lys or Arg or His
  misc_feature (43)..(43): Absent or Ile or Phe or Leu or Ser or Thr or Val
  misc_feature (44)..(44): Absent or Pro or Leu or Thr or Ser or Lys or Arg or Val
  misc_feature (45)..(45): Absent or Phe or Thr or Gly or Ser or Ile
  misc_feature (46)..(46): Absent or Phe or Ser or Gln or Val or Ala
  misc_feature (47)..(47): Absent or Phe or Ala or Gln or Gly or Asp
  misc_feature (48)..(48): Absent or Asn or Pro or Ser or Gln or Ala
  misc_feature (49)..(49): Absent or Val or Ala or Pro or Gln or Ser
  misc_feature (50)..(50): Absent or Cys or Ser or Leu or Phe or Thr or Val
  misc_feature (51)..(51): Absent or Ile or Pro or Arg or Thr or Ser
  misc_feature (52)..(52): Absent or Asn or Ser or Leu or Phe or Thr
  misc_feature (53)..(53): Absent or Lys or Val or Thr or Asn or Arg
  misc_feature (54)..(54): Absent or Ser or Lys or Ala or Gly
  misc_feature (55)..(55): Absent or Glu or Pro or Ala or Ser or Val or Thr
  misc_feature (56)..(56): Absent or Lys or Leu or Ile or Thr or Ala
  misc_feature (57)..(57): Absent or Ser or Arg or His or Ala
  misc_feature (58)..(58): Absent or Leu or Ile or Val or Ser or Ala
  misc_feature (59)..(59): Absent or Thr or Arg or Lys or Ser
  misc_feature (60)..(60): Absent or Val or Ser or Arg or Gly
  misc_feature (61)..(61): Absent or Thr or Ser or Ile or Gly
  misc_feature (62)..(62): Absent or Phe or Asn or Ser or Gly or Arg or Gln
  misc_feature (63)..(63): Absent or Ile or Val or Thr or Pro or Leu
  misc_feature (64)..(64): Absent or Ala or Thr or Glu
  misc_feature (65)..(65): Absent or Ala or Lys or Ile or Gly or Thr
  misc_feature (66)..(66): Absent or Ala or Phe or Tyr or Gly or Ser
  misc_feature (67)..(67): Absent or Gln or Asp or Asn or Val or Thr
  misc_feature (68)..(68): Absent or Gly or Glu or Ala or Asp
  misc_feature (69)..(69): Absent or Ser or Val or Gly or Ala
  misc_feature (70)..(70): Absent or Ser or Thr or Val or Ile or Ala
  misc_feature (71)..(71): Absent or Val or Asn or Ala or Leu
  misc_feature (72)..(72): Absent or Val or Ser or Gly or Ala
  misc_feature (73)..(73): Absent or Pro or Leu or Val or Gly or Ala
  misc_feature (74)..(74): Absent or Ser or Asp or Glu or Gly
  misc_feature (75)..(75): Absent or Ser or Asp or Glu
  misc_feature (76)..(76): Absent or Ala or Asp or Glu
  misc_feature (77)..(77): Absent or Lys or Ile or Met or Leu or Gly
  misc_feature (78)..(78): Absent or Val or Glu or Asp
  misc_feature (79)..(79): Absent or Asp or Arg or Gln or Lys or Ser or Val
  misc_feature (80)..(80): Absent or Phe or Ile or Val
  misc_feature (81)..(81): Absent or Leu or Lys or Arg
  misc_feature (82)..(82): Absent or Lys or Arg
  misc_feature (83)..(83): Absent or Leu
  misc_feature (84)..(84): Absent or Gln
  misc_feature (85)..(85): Absent or Asn
  misc_feature (86)..(86): Absent or Gly
  misc_feature (87)..(87): Absent or Ser or Pro
  misc_feature (88)..(88): Absent or Asp
  misc_feature (89)..(89): Absent or Ile or Val
  misc_feature (90)..(90): Absent or Arg or Ser
  misc_feature (91)..(91): Absent or Gly or Arg
  misc_feature (92)..(92): Absent or Val
  misc_feature (93)..(93): Absent or Ala
  misc_feature (94)..(94): Absent or Val or Leu
  misc_feature (95)..(95): Absent or Gly or Glu or Gln
  misc_feature (96)..(96): Absent or Gly
  misc_feature (97)..(97): Absent or Val or Glu
  misc_feature (98)..(98): Absent or Glu or Lys or Asn
  misc_feature (99)..(99): Absent or Gly or Cys
  misc_feature (100)..(100): Absent or Glu or Arg
  misc_feature (101)..(101): Absent or Pro or Glu or Thr or Ala
  misc_feature (102)..(102): Absent or Val
  misc_feature (103)..(103): Absent or Asn or Asp
  misc_feature (104)..(104): Absent or Leu
  misc_feature (105)..(105): Absent or Thr or Ser
  misc_feature (106)..(106): Absent or Glu or Pro
  misc_feature (107)..(107): Absent or Pro or Ala or Leu
  misc_feature (108)..(108): Absent or Val or Ala
  misc_feature (109)..(109): Absent or Thr or Val
  misc_feature (110)..(110): Absent or Glu
  misc_feature (111)..(111): Absent or Ala or Val
  misc_feature (112)..(112): Absent or Ile
  misc_feature (113)..(113): Absent or Ala or Ser
  misc_feature (114)..(114): Absent or Ser or Glu
  misc_feature (115)..(115): Absent or Ala or Ser
  misc_feature (116)..(116): Absent or Phe
  misc_feature (117)..(117): Absent or Ala or Gly
  misc_feature (118)..(118): Absent or Ala or Glu
  misc_feature (119)..(119): Absent or Trp
  misc_feature (120)..(120): Absent or Leu or Val or Ile
  misc_feature (121)..(121): Absent or Leu or Ile or Ala or Met or Arg
  misc_feature (122)..(122): Absent or Asn or Ala or Lys or Glu
  misc_feature (123)..(123): Absent or Lys or Thr or Arg or Gly or Glu
  misc_feature (124)..(124): Absent or Lys or Leu or Glu
  misc_feature (125)..(125): Absent or Lys or Arg or Ser or Glu or Leu or Gln
  misc_feature (126)..(126): Absent or Ala or Asp or Asn or Ser or Lys or Arg or Gln
  misc_feature (127)..(127): Absent or Asp
  misc_feature (128)..(128): Absent or Gly or Asp
  misc_feature (129)..(129): Absent or Asp
  misc_feature (130)..(130): Absent or Tyr or Leu
  misc_feature (131)..(131): Absent or Lys or Gly or Glu or Arg
  misc_feature (132)..(132): Absent or Glu or Asn or Gly or Lys or Ser
  misc_feature (133)..(133): Absent or Lys or Gly or Glu or Gln
  misc_feature (134)..(134): Absent or Gln or Val or Tyr or Arg or Glu
  misc_feature (135)..(135): Absent or Gly or Pro or Val or Asp
  misc_feature (136)..(136): Absent or Trp or Val or Gln or Glu or Gly
  misc_feature (137)..(137): Absent or Arg or Asp or Glu or Gln or Gly
  misc_feature (138)..(138): Absent or Arg or Val or Gly or Asn or Asp or Gln or Leu or Glu
  misc_feature (139)..(139): Absent or Leu or Val or Ile or Arg
  misc_feature (140)..(140): Absent or Arg or Lys
  misc_feature (141)..(141): Absent or Ile or Val
  misc_feature (142)..(142): Absent or Ser
  misc_feature (143)..(143): Absent or Val or Leu
  misc_feature (144)..(144): Absent or Gly
  misc_feature (145)..(145): Absent or His or Lys or Arg
  misc_feature (146)..(146): Absent or Asp
  misc_feature (147)..(147): Absent or Ser or Pro
  misc_feature (148)..(148): Absent or Arg
  misc_feature (149)..(149): Absent or Ile or Val or Leu
  misc_feature (150)..(150): Absent or Ser or Thr
  misc_feature (151)..(151): Absent or Ala or Gly
  misc_feature (152)..(152): Absent or His or Ala or Gly or Ser or Pro
  misc_feature (153)..(153): Absent or Lys or Ser or Arg
  misc_feature (154)..(154): Absent or Leu
  misc_feature (155)..(155): Absent or Gln or Ser or Gly
  misc_feature (156)..(156): Absent or Asp or Val or Thr or Ala
  misc_feature (157)..(157): Absent or Ala
  misc_feature (158)..(158): Absent or Val or Leu
  misc_feature (159)..(159): Absent or Thr or Phe
  misc_feature (160)..(160): Absent or Leu or Ser or Ala
  misc_feature (161)..(161): Absent or Gly or Met
  misc_feature (162)..(162): Absent or Ile or Leu or Pro
  misc_feature (163)..(163): Absent or Thr or Ala or Ser or Val or Cys
  misc_feature (164)..(164): Absent or Thr or Arg or Ser or Asn
  misc_feature (165)..(165): Absent or Ala
  misc_feature (166)..(166): Absent or Gly or Cys
  misc_feature (167)..(167): Absent or His or Cys or Val
  misc_feature (168)..(168): Absent or Asp or Leu or Met or Ser
  misc_feature (169)..(169): Absent or Val or Ala or Leu
  misc_feature (170)..(170): Absent or Leu or Phe or Tyr or Val
  misc_feature (171)..(171): Absent or Gln or Asp or Asn
  misc_feature (172)..(172): Absent or Phe or Met or Tyr or Val
  misc_feature (173)..(173): Absent or Gly or Tyr
  misc_feature (174)..(174): Absent or Leu or Val
  misc_feature (175)..(175): Absent or Ala or Arg
  misc_feature (176)..(176): Absent or Ser or Thr or Ile
  misc_feature (177)..(177): Absent or Thr or Gly
  misc_feature (178)..(178): Absent or Pro or Val
  misc_feature (179)..(179): Absent or Ala
  misc_feature (180)..(180): Absent or Met
  misc_feature (181)..(181): Absent or Phe
  misc_feature (182)..(182): Absent or Asn
  misc_feature (183)..(183): Absent or Ser or Ala
  misc_feature (184)..(184): Absent or Thr or Cys
  misc_feature (185)..(185): Absent or Leu or Phe or Met
  misc_feature (186)..(186): Absent or Thr or Met or Gln
  misc_feature (187)..(187): Absent or Glu or Ser
  misc_feature (188)..(188): Absent or Asp or Thr
  misc_feature (189)..(189): Absent or Glu or Val or Leu or Ile or Lys
  misc_feature (190)..(190): Absent or Ile or Phe or Leu
  misc_feature (191)..(191): Absent or Asn or Pro or Ser or His or Thr
  misc_feature (192)..(192): Absent or His or Pro or Arg
  misc_feature (193)..(193): Absent or Cys or Phe
  misc_feature (194)..(194): Absent or Pro or Ser or Glu or Ala or Asn
  misc_feature (195)..(195): Absent or Val or Tyr
  misc_feature (196)..(196): Absent or Asp or His
  misc_feature (197)..(197): Absent or Gly or Ala
  misc_feature (198)..(198): Absent or Ala or Ser
  misc_feature (199)..(199): Absent or Ile or Met
  misc_feature (200)..(200): Absent or Met
  misc_feature (201)..(201): Absent or Ile or Met or Leu
  misc_feature (202)..(202): Absent or Thr
  misc_feature (203)..(203): Absent or Ala
  misc_feature (204)..(204): Absent or Ser
  misc_feature (205)..(205): Absent or His
  misc_feature (206)..(206): Absent or Leu
  misc_feature (207)..(207): Absent or Pro
  misc_feature (208)..(208): Absent or Tyr
  misc_feature (209)..(209): Absent or Asn or Thr
  misc_feature (210)..(210): Absent or Arg
  misc_feature (211)..(211): Absent or Asn
  misc_feature (212)..(212): Absent or Gly
  misc_feature (213)..(213): Absent or Leu
  misc_feature (214)..(214): Absent or Lys
  misc_feature (215)..(215): Absent or Phe or Leu
  misc_feature (216)..(216): Absent or Phe
  misc_feature (217)..(217): Absent or Thr or Met
  misc_feature (218)..(218): Absent or Ser or Arg or Lys
  misc_feature (219)..(219): Absent or Ala or Arg or Lys
  misc_feature (220)..(220): Absent or Gly
  misc_feature (221)..(221): Absent or Gly
  misc_feature (222)..(222): Absent or Leu
  misc_feature (223)..(223): Absent or Asn or Thr
  misc_feature (224)..(224): Absent or Lys or Ser
  misc_feature (225)..(225): Absent or Ala or Leu or Pro or Thr or Gly
  misc_feature (226)..(226): Absent or Asp or Glu or Gly
  misc_feature (227)..(227): Absent or Ile or Val or Glu
  misc_feature (228)..(228): Absent or Lys or Glu or Val
  misc_feature (229)..(229): Absent or Asp or Glu or Lys or Ala or Thr or Asn
  misc_feature (230)..(230): Absent or Ile or Gly
  misc_feature (231)..(231): Absent or Leu or Cys or Val
  misc_feature (232)..(232): Absent or Glu or Asp or Gly or Cys
  misc_feature (233)..(233): Absent or Arg or Leu or Lys or Asp
  misc_feature (234)..(234): Absent or Ala or Arg
  misc_feature (235)..(235): Absent or Ser or Ala
  misc_feature (236)..(236): Absent or Arg or Gln or His or Ala
  misc_feature (237)..(237): Absent or Ile or Lys or Arg
  misc_feature (238)..(238): Absent or Tyr or Lys
  misc_feature (239)..(239): Absent or Glu or Val or Tyr
  misc_feature (240)..(240): Absent or Asp or Lys or Ala or Val
  misc_feature (241)..(241): Absent or Ser or Tyr or His or Arg or Ala
  misc_feature (242)..(242): Absent or Ser or Ala or Arg or Lys
  misc_feature (243)..(243): Absent or His or Asn or Thr or Phe or Lys or Ala
  misc_feature (244)..(244): Absent or Gly or Arg or Val or Met
  misc_feature (245)..(245): Absent or Gln or Leu or Met or Gly or Val or Ser
  misc_feature (246)..(246): Absent or Ala or Thr or Met or Leu or Gly or Ser
  misc_feature (247)..(247): Absent or Ser or Lys or Gly or Pro
  misc_feature (248)..(248): Absent or Thr or Val or Gly or Asp or Ser
  misc_feature (249)..(249): Absent or Gln or Ser or Gly or Thr
  misc_feature (250)..(250): Absent or Glu or Leu or Thr or Arg or Pro or Gly
  misc_feature (251)..(251): Absent or Leu or Thr or Met or Gly or Pro or Ala
  misc_feature (252)..(252): Absent or Glu or Leu or Ile or Met or Pro or Thr or Ser
  misc_feature (253)..(253): Absent or Gln or Ile or Arg or Ser or Asn or Lys or Pro
  misc_feature (254)..(254): Absent or Ala or Asn or Thr or Ile or Val or X or Pro or Ser
  misc_feature (255)..(255): Absent or Ser or Pro or Arg or Leu or Val or Thr
  misc_feature (256)..(256): Absent or Lys or Pro or Val or Ala
  misc_feature (257)..(257): Absent or Gly or Thr or Gln or Glu or Met or Ile
  misc_feature (258)..(258): Absent or Glu or Lys or Gln or Arg or Ala
  misc_feature (259)..(259): Absent or Val or Leu
  misc_feature (260)..(260): Absent or Ser or Asn or Asp or Thr
  misc_feature (261)..(261): Absent or Asn or Leu or Phe
  misc_feature (262)..(262): Absent or Val or Met or Tyr
  misc_feature (263)..(263): Absent or Asp or Ser
  misc_feature (264)..(264): Absent or Tyr or Ala or Thr
  misc_feature (265)..(265): Absent or Met or Tyr
  misc_feature (266)..(266): Absent or Ser or Ala
  misc_feature (267)..(267): Absent or Ile or Asn or Lys or Met or Gln
  misc_feature (268)..(268): Absent or Tyr or His
  misc_feature (269)..(269): Absent or Ala or Leu
  misc_feature (270)..(270): Absent or Ser or Arg
  misc_feature (271)..(271): Absent or Asp or Glu or Asn
  misc_feature (272)..(272): Absent or Leu or Ile
  misc_feature (273)..(273): Absent or Val or Ile
  misc_feature (274)..(274): Absent or Lys
  misc_feature (275)..(275): Absent or Ala or Glu or Gln
  misc_feature (276)..(276): Absent or Val or Arg
  misc_feature (277)..(277): Absent or Arg or Ile or Val
  misc_feature (278)..(278): Absent or Lys or Asn or Ser or Ala
  misc_feature (279)..(279): Absent or Ser or His
  misc_feature (280)..(280): Absent or Ala or Pro or Asp
  misc_feature (281)..(281): Absent or Gly or Thr or Glu or Leu or Phe or X
  misc_feature (282)..(282): Absent or Asn or His or Phe
  misc_feature (283)..(283): Absent or Lys or Tyr
  misc_feature (284)..(284): Absent or Glu or Asp or His
  misc_feature (285)..(285): Absent or Lys or Thr or Ile
  misc_feature (286)..(286): Absent or Pro or Ser
  misc_feature (287)..(287): Absent or Leu
  misc_feature (288)..(288): Absent or Glu or Gln or Lys or Arg or Thr
  misc_feature (289)..(289): Absent or Gly or Glu or Thr
  misc_feature (290)..(290): Absent or Leu or Phe or Ser
  misc_feature (291)..(291): Absent or His or Gln or Lys or Thr
  misc_feature (292)..(292): Absent or Ile or Val or Leu
  misc_feature (293)..(293): Absent or Val or Ile
  misc_feature (294)..(294): Absent or Val or Thr
  misc_feature (295)..(295): Absent or Asp or Asn
  misc_feature (296)..(296): Absent or Ala or Ser
  misc_feature (297)..(297): Absent or Gly
  misc_feature (298)..(298): Absent or Asn
  misc_feature (299)..(299): Absent or Gly
  misc_feature (300)..(300): Absent or Ala or Ser or Cys
  misc_feature (301)..(301): Absent or Gly
  misc_feature (302)..(302): Absent or Gly
  misc_feature (303)..(303): Absent or Phe
  misc_feature (304)..(304): Absent or Phe
  misc_feature (305)..(305): Absent or Val or Thr or Lys
  misc_feature (306)..(306): Absent or Asp or Trp or Arg
  misc_feature (307)..(307): Lys or Asp or Absent
  misc_feature (308)..(308): Val or Absent
  misc_feature (309)..(309): Leu or Absent
  misc_feature (310)..(310): Ala or Lys or Asp or Absent or Glu
  misc_feature (311)..(311): Glu or Pro or Lys or Absent or Asp
  misc_feature (312)..(312): Leu or Absent or Ile
  misc_feature (313)..(313): Gly or Absent or His
  misc_feature (314)..(314): Ala or Absent or Ser
  misc_feature (315)..(315): Asp or Ile or Absent or Glu
  misc_feature (316)..(316): Ile or Thr or Absent
  misc_feature (317)..(317): Ser or Thr or Phe or Absent
  misc_feature (318)..(318): Gly or Absent
  misc_feature (319)..(319): Ser or Absent
  misc_feature (320)..(320): Gln or Leu or Absent
  misc_feature (321)..(321): Phe or Tyr or Asn or Absent or His
  misc_feature (322)..(322): Ile or Leu or Absent
  misc_feature (323)..(323): Glu or Asn or Ser or Absent or Asp
  misc_feature (324)..(324): Pro or Absent
  misc_feature (325)..(325): Asp or Absent
  misc_feature (326)..(326): Gly or Absent
  misc_feature (327)..(327): Lys or Met or Absent or Arg
  misc_feature (330)..(330): Asn or Absent or His
  misc_feature (332)..(332): Ile or Absent or Met
  misc_feature (336)..(336): Asp or Glu or Absent
  misc_feature (337)..(337): Asn or Asp or Absent
  misc_feature (338)..(338): Glu or Lys or Absent or Thr or Ala
  misc_feature (339)..(339): Glu or Thr or Lys or Ile or Absent
  misc_feature (342)..(342): Ala or Lys or Gln or Absent or Ser
  misc_feature (343)..(343): Ser or Ala or Leu or His or Absent
  misc_feature (344)..(344): Leu or Ile or Thr or Absent
  misc_feature (345)..(345): Lys or Thr or Arg or Absent
  misc_feature (346)..(346): Lys or Gln or Ala or Absent or Asp or Gly
  misc_feature (349)..(349): Leu or Ala or Absent
  misc_feature (350)..(350): Ala or Asp or Glu or Absent or Gln
  misc_feature (351)..(351): Ser or Asn or Absent or His or Gln
  misc_feature (352)..(352): Gly or Lys or Ser or Asn or Absent
  misc_feature (357)..(357): Val or Ile or Absent
  misc_feature (358)..(358): Ile or Val or Absent
  misc_feature (366)..(366): Ala or Ser or Absent
  misc_feature (367)..(367): Ala or Gly or Absent
  misc_feature (368)..(368): Ile or Ala or Val or Absent
  misc_feature (369)..(369): Met or Val or Absent
  misc_feature (371)..(371): Lys or Ser or Asn or Absent or Ala
  misc_feature (372)..(372): Asn or Ser or Lys or Absent or Glu or Thr or Gly
  misc_feature (374)..(374): Glu or Arg or Asn or Absent or Ala
  misc_feature (375)..(375): Ser or Glu or Pro or Absent or Ala
  misc_feature (376)..(376): Leu or Ile or Absent
  misc_feature (378)..(378): Arg or Gly or Absent
  misc_feature (379)..(379): Asn or Asp or Absent
  misc_feature (380)..(380): Pro or Arg or Lys or Absent
  misc_feature (384)..(384): Val or Leu or Absent
  misc_feature (385)..(385): Ile or Met or Absent
  misc_feature (386)..(386): Ser or Ala or Absent
  misc_feature (387)..(387): Ser or Ala or Absent
  misc_feature (389)..(389): Ile or Val or Absent
  misc_feature (391)..(391): Lys or Glu or Arg or Absent or Thr or Asp or Gly
  misc_feature (393)..(393): Lys or His or Absent
  misc_feature (394)..(394): Pro or Absent or Gly
  misc_feature (395)..(395): Gly or Glu or Absent
  misc_feature (396)..(396): Thr or Ser or Absent
  misc_feature (397)..(397): Thr or Absent or Met
  misc_feature (398)..(398): Ile or Val or Absent
  misc_feature (402)..(402): Ser or Ala or Absent
  misc_feature (403)..(403): Thr or Val or Arg or Absent
  misc_feature (404)..(404): Thr or Absent or Ala
  misc_feature (406)..(406): Gly or Asp or Ile or Met or Absent
  misc_feature (407)..(407): His or Gly or Ala or Absent
  misc_feature (409)..(409): Gln or Thr or Ser or Absent
  misc_feature (410)..(410): Ala or Thr or Arg or Gln or Absent
  misc_feature (412)..(412): Ile or Absent or Val
  misc_feature (413)..(413): Glu or Thr or Ala or Absent or Ile or Gln or Asn
  misc_feature (414)..(414): Ala or Asn or Glu or Absent or Asp or Ser
  misc_feature (415)..(415): Lys or Arg or Absent or Ser
  misc_feature (416)..(416): Absent or Leu
  misc_feature (419)..(419): Lys or Arg or His or Absent or Gln
  misc_feature (420)..(420): Gln or His or Absent
  misc_feature (421)..(421): His or Cys or Absent
  misc_feature (422)..(422): Arg or Leu or Absent
  misc_feature (423)..(423): Phe or Tyr or Absent
  misc_feature (424)..(424): Lys or Arg or Absent
  misc_feature (425)..(425): Arg or Val or Absent
  misc_feature (428)..(428): Arg or Lys or Absent
  misc_feature (432)..(432): Asn or Asp or Absent
  misc_feature (433)..(433): Glu or Lys or Absent
  misc_feature (434)..(434): Ala or Gly or Absent
  misc_feature (435)..(435): Leu or Ile or Val or Absent
  misc_feature (436)..(436): Arg or Gln or Glu or Absent or His
  misc_feature (439)..(439): Glu or Thr or Lys or Absent or Asn or Ala or Asp or Pro
  misc_feature (440)..(440): Asn or Ile or Asp or Absent or Ala
  misc_feature (442)..(442): Thr or Glu or Ile or Absent or Val or Ala
  misc_feature (444)..(444): Ser or Thr or Ala or Absent
  misc_feature (447)..(447): Ala or Met or Absent
  misc_feature (451)..(451): Ser or Absent or Thr
  misc_feature (460)..(460): Tyr or His or Absent or Asn
  misc_feature (468)..(468): Leu or Met or Absent or Ile
  misc_feature (480)..(480): Arg or Lys or Absent or Gly
  misc_feature (482)..(482): Asn or Leu or Ser or Ala or Absent or Val
  misc_feature (484)..(484): Absent or Pro or Ser or Leu or Val
  misc_feature (485)..(485): Absent or Asn
  misc_feature (486)..(486): Absent or Val
  misc_feature (487)..(487): Absent or Gly
  misc_feature (488)..(488): Gly or Ser or Asn or Tyr or Absent or Asp or Glu
  misc_feature (489)..(489): Gln or Lys or Glu or Absent or Gly
  misc_feature (490)..(490): Asp or Val or Gly or Absent or Ser
  misc_feature (491)..(491): Leu or Ile or Absent or Val
  misc_feature (493)..(493): Asp or Asn or Ser or Absent or Thr or Gly
  misc_feature (496)..(496): Ala or Glu or Absent or Lys or Met or Arg
  misc_feature (499)..(499): Lys or Glu or Gln or Absent
  misc_feature (502)..(502): Ala or Ser or Val or Leu or Phe or Absent or Tyr or Arg
  misc_feature (505)..(505): Glu or Val or Absent or Ile or Gln or Lys
  misc_feature (506)..(506): Glu or Absent or Leu
  misc_feature (507)..(507): Ile or Leu or Absent or Met
  misc_feature (509)..(509): Leu or Met or Absent or Ile
  misc_feature (510)..(510): Asn or Lys or Asp or Absent
  misc_feature (511)..(511): Ile or Val or Absent
  misc_feature (512)..(512): Thr or Asp or Ile or Leu or Absent or Met or Val
  misc_feature (513)..(513): Ala or Gln or Ser or Absent or Gly
  misc_feature (515)..(515): Absent or His or Pro or Ala
  misc_feature (516)..(516): Absent or Ala or Arg or Lys
  misc_feature (517)..(517): Absent or Asp or Tyr or His or Leu or Ser
  misc_feature (520)..(520): Absent or Gly or Thr or Ala or Pro or Gln or Glu
  misc_feature (521)..(521): Absent or Lys or Arg
  misc_feature (522)..(522): Absent or Ala or Gly
  misc_feature (523)..(523): Absent or Val or Ile or Ala or Thr
  misc_feature (524)..(524): Absent or Glu or Asp or Gln or His
  misc_feature (525)..(525): Absent or Val or Ala
  misc_feature (526)..(526): Absent or Ile or Val
  misc_feature (528)..(528): Asp or Ser or Thr or Ala or Ile or Lys or Absent
  misc_feature (530)..(530): Lys or Arg or Absent
  misc_feature (531)..(531): Thr or Asp or Arg or Gln or Asn or Ser or Absent or Lys
  misc_feature (532)..(532): Tyr or Phe or Absent or His
  misc_feature (534)..(534): Absent or Glu or Met or Gln
  misc_feature (536)..(536): Absent or Asp or Gly
  misc_feature (537)..(537): Absent or Lys or X or Arg
  misc_feature (539)..(539): Absent or Glu or Lys or Ser or Phe or Asn
  misc_feature (541)..(541): Lys or Glu or Absent or X
  misc_feature (543)..(543): Val or Met or Glu or Ala or Absent
  misc_feature (546)..(546): Asp or His or Ser or Thr or Tyr or Absent
  misc_feature (551)..(551): Val or Ile or Trp or Ser or Absent
  misc_feature (553)..(553): Glu or Lys or Gly or Thr or Ser or Ala or Asp or Absent
  misc_feature (554)..(554): Asp or Glu or Phe or Gln or Absent
  misc_feature (558)..(558): Glu or Cys or Val or Pro or Met or Thr
  misc_feature (560)..(560): Glu or Ala or Leu or Ser or Thr or Asn
  misc_feature (562)..(562): Ser or Lys or Glu or Asp or Absent or Asn
  misc_feature (563)..(563): Asn or His or Thr or Asp or Absent or Arg
  misc_feature (565)..(565): Glu or Thr or Ser or Ala or Absent or Ile or Phe
  misc_feature (566)..(566): Gly or Ala or Pro or Absent or Asp or Asn
  misc_feature (567)..(567): Val or Ile or Absent
  misc_feature (570)..(570): Asn or Ser or His or Tyr or Gln or Absent
  misc_feature (574)..(574): Absent or Ala
  misc_feature (575)..(575): Absent or Val or Ala or Thr or Arg or Pro
  misc_feature (576)..(576): Absent or Lys or Arg or Ala
  misc_feature (577)..(577): Absent or Val or Lys
  misc_feature (578)..(578): Absent or Leu or Ser or Phe
  misc_feature (579)..(579): Absent or Asp or Asn or Tyr or Phe
  misc_feature (580)..(580): Absent or Asn or Glu or Lys or Asp
  misc_feature (582)..(582): Absent or Gln or Ser or His or Leu or Asn or Tyr
  misc_feature (583)..(583): Absent or Asn or Gly or Ala or Glu or Gln or Lys
  misc_feature (584)..(584): Absent or Glu or Arg or Gly
  misc_feature (585)..(585): Absent or Glu or Gln or Ala or Pro
  misc_feature (586)..(586): Absent or His or Tyr or Leu or Val
  misc_feature (591)..(591): Absent or Leu or Met or Ile
  misc_feature (595)..(595): Absent or Leu or Val or Ile
  misc_feature (602)..(602): Absent or Leu or Val or Ile
  misc_feature (604)..(604): Absent or Ile or Met or Leu
  misc_feature (607)..(607): Absent or Pro or Ser or Met or Tyr or Cys
  misc_feature (608)..(608): Absent or Ser or Ile or Leu or Val or Ala
  misc_feature (613)..(613): Absent or Ile or Arg or Leu or Gln or Lys
  misc_feature (614)..(614): Absent or X
  misc_feature (617)..(617): Absent or Thr or Ala
  misc_feature (618)..(618): Absent or Glu or Arg or Lys or Val
  misc_feature (619)..(619): Absent or Lys or Ile or Val or Ala or Thr or Asp
  misc_feature (620)..(620): Absent or Leu or Phe
  misc_feature (621)..(621): Absent or Gly or Lys or Arg or His or Leu or Phe
  misc_feature (622)..(622): Absent or Leu or Asp or Glu or Gln
  misc_feature (623)..(623): Absent or Ala or Lys or Gln or Glu or Arg
  misc_feature (624)..(624): Absent or Val or Phe or Tyr
  misc_feature (626)..(626): Absent or Thr or Phe or Glu or Ile or Lys or Val or Leu
  misc_feature (627)..(627): Absent or Ala or Thr
  misc_feature (630)..(630): Absent or Glu or Leu or Val or Met or Ile
  misc_feature (631)..(631): Absent or Phe or Asp or Ala or Glu or His or Asn
  misc_feature (632)..(632): Absent or Pro or Lys or Arg or Thr or Glu or Gly
  misc_feature (633)..(633): Absent or Ala or Val or Phe or Ser or Ile
  misc_feature (634)..(634): Absent or Leu or Val
  misc_feature (637)..(637): Absent or Thr or Ser
  misc_feature (638)..(638): Absent or Ala or Gln or Asp or Glu
  misc_feature (639)..(639): Absent or Leu or Ile or Phe or Val
  misc_feature (640)..(640): Absent or Asn or Glu or Asp or Gln
  misc_feature (642)..(642): Absent or Phe or Tyr
  misc_feature (643)..(643): Absent or Leu or Val or Ile or Ala
  misc_feature (644)..(644): Absent or Gln or Lys or Gly or Glu or Asn or Arg
  misc_feature (645)..(645): Absent or Gln or Glu or Gly or Ser or Asn or Thr
  misc_feature (646)..(646): Absent or His or Gln or Gly
  misc_feature (647)..(647): Absent or Ser or Gln or Ile or Leu
  misc_feature (648)..(648): Absent or Val or Lys or Ala
  misc_feature (649)..(649): Absent or Gly or Ala or Lys
  misc_feature (650)..(650): Absent or Tyr
  misc_feature (651)..(651): Absent or Phe
  misc_feature (652)..(652): Absent or Ala
  misc_feature (653)..(653): Absent or Ile
  misc_feature (654)..(654): Absent or Leu
  misc_feature (655)..(655): Absent or Asn
  misc_feature (656)..(656): Absent or Lys
  misc_feature (657)..(657): Absent or Asn
  misc_feature (658)..(658): Absent or Ala
  misc_feature (659)..(659): Absent or Glu
  misc_feature (660)..(660): Absent or Ser
  misc_feature (661)..(661): Absent or Leu
  misc_feature (662)..(662): Absent or Gln
  misc_feature (663)..(663): Absent or Ile
  misc_feature (664)..(664): Absent or Glu
  misc_feature (665)..(665): Absent or Ala
  misc_feature (666)..(666): Absent or Phe
  misc_feature (667)..(667): Absent or Ile
  misc_feature (668)..(668): Absent or Lys
  misc_feature (669)..(669): Absent or Ala
  misc_feature (670)..(670): Absent or Gln
  misc_feature (671)..(671): Absent or Thr
  misc_feature (672)..(672): Absent or Ser
  misc_feature (673)..(673): Absent or Val
  unsure (1)..(673): unsure at all Xaa locations
XXXXXXXXXXXXXXXXXXXXXXXXXXXXXXXXXXXXXXXXXXXXXXXXXXXXXXXXXXXXXXXXXXXXXXXXXXXXXXXXXXXXXXXXXXXXXXXXXXXXXXXXXXXXXXXXXXXXXXXXXXXXXXXXXXXXXXXXXXXXXXXXXXXXXXXXXXXXXXXXXXXXXXXXXXXXXXXXXXXXXXXXXXXXXXXXXXXXXXXXXXXXXXXXXXXXXXXXXXXXXXXXXXXXXXXXXXXXXXXXXXXXXXXXXXXXXXXXXXXXXXXXXXXXXXXXXXXXXXXXXXXXXXXXXXXXXXXXXXXXXXXXXXXXXXXXXXXXXXXXXXXXXXXFPXHXPNPXXXXAMXXXXXAVXXXXADLGXXFDTDVDRXXXXDXXGXXXNXXXLIAXXXXIXLXEXXXXXXVTDXXXSXXLXXFXXXXXGGXXXXXXXGYXNVIXXXXXLNXXGXEXHLXMETXGHGALKENXFLDDGAYXVVKIIIEMVRMXLXGXXXXXXXXGXLIXDLXEPXESXXXRXXXXXEXXXAKXXXXXXXEXFXXXIXEXXLXGXWXLDXCGDCXVXXGCLXDXNXXPXXXDAXMYRXXXXXXXEXXXXXGWVHXRQSXHNPNIAXNXQSXXPGGCXXSMXXXXXXXXLXXSGXXXXXDIXXXXKXXXXXXXXXXXXXXXXXXXXXXXXXXXXXXXX

SEQ ID NO: 36457 - protein, 365 aa, Artificial sequence
  consensus sequence of seq id no: 385 and its homologs
  misc_feature (1)..(1): Gln or Absent
  misc_feature (2)..(2): Pro or Absent
  misc_feature (3)..(3): Pro or Absent
  misc_feature (4)..(4): Gly or Absent
  misc_feature (5)..(5): Ala or Absent
  misc_feature (6)..(6): Asp or Absent
  misc_feature (7)..(7): Cys or Absent
  misc_feature (8)..(8): Met or Absent
  misc_feature (9)..(9): Phe or Absent
  misc_feature (10)..(10): Ser or Absent
  misc_feature (11)..(11): Ala or Absent
  misc_feature (12)..(12): Met or Absent
  misc_feature (13)..(13): Leu or Absent
  misc_feature (14)..(14): Gly or Absent
  misc_feature (15)..(15): Leu or Absent
  misc_feature (16)..(16): Cys or Absent
  misc_feature (17)..(17): Thr or Absent
  misc_feature (18)..(18): Leu or Absent
  misc_feature (19)..(19): Arg or Absent
  misc_feature (20)..(20): Met or Absent
  misc_feature (21)..(21): Trp or Absent
  misc_feature (22)..(22): Thr or Absent
  misc_feature (23)..(23): Met or Absent
  misc_feature (24)..(24): Pro or Absent
  misc_feature (25)..(25): Thr or Absent
  misc_feature (26)..(26): Ala or Absent
  misc_feature (27)..(27): Leu or Absent
  misc_feature (28)..(28): Phe or Absent
  misc_feature (29)..(29): Ser or Absent
  misc_feature (30)..(30): Ser or Absent
  misc_feature (31)..(31): Tyr or Ser or Absent
  misc_feature (32)..(32): Ser or Val or Absent
  misc_feature (33)..(33): Phe or Leu or Absent
  misc_feature (34)..(34): Ala or Pro or Absent
  misc_feature (35)..(35): Leu or Trp or Absent
  misc_feature (36)..(36): Tyr or Glu or Leu
  misc_feature (37)..(37): Met or Ala or Ser
  misc_feature (38)..(38): Cys or Leu
  misc_feature (39)..(39): Ala or Arg
  misc_feature (41)..(41): Thr or Ser or Cys
  misc_feature (42)..(42): Leu or Asp or Met
  misc_feature (43)..(43): Met or His or Ile
  misc_feature (44)..(44): Gly or Ile or Lys
  misc_feature (45)..(45): Ser or Phe or Val
  misc_feature (47)..(47): Phe or Arg or Ser
  misc_feature (48)..(48): Val or Leu
  misc_feature (49)..(49): Ser or Phe or Tyr
  misc_feature (50)..(50): Val or Glu
  misc_feature (51)..(51): Arg or Ser
  misc_feature (52)..(52): His or Glu or Ser
  misc_feature (53)..(53): Pro or Thr
  misc_feature (54)..(54): Ser or Gly
  misc_feature (55)..(55): Ala or Phe or Val
  misc_feature (56)..(56): Thr or Arg or Ser
  misc_feature (57)..(57): Glu or Arg or Asn
  misc_feature (58)..(58): Gln or Gly or Glu
  misc_feature (59)..(59): Ser or Val or Ile
  misc_feature (60)..(60): Pro or Ser or Ala
  misc_feature (61)..(61): Gln or Ser
  misc_feature (62)..(62): Ser or Trp
  misc_feature (63)..(63): Ser or Glu or Asn
  misc_feature (64)..(64): Ser or Pro or Ala
  misc_feature (65)..(65): Thr or Tyr or Cys
  misc_feature (66)..(66): Gln or Glu or Leu
  misc_feature (67)..(67): Pro or Tyr or Ala
  misc_feature (68)..(68): Lys or His or Arg
  misc_feature (69)..(69): Ser or Absent
  misc_feature (70)..(70): Leu or Absent
  misc_feature (71)..(71): Ser or Absent
  misc_feature (72)..(72): Ser or Absent
  misc_feature (73)..(73): Trp or Absent
  misc_feature (74)..(74): Met or Absent
  misc_feature (75)..(75): Phe or Absent
  misc_feature (76)..(76): Leu or Met
  misc_feature (77)..(77): Lys or Ala or Gln
  misc_feature (78)..(78): Ala or Glu
  misc_feature (79)..(79): Ser or Val or Leu
  misc_feature (80)..(80): Thr or Glu or Ser
  misc_feature (81)..(81): Ala or Gly
  misc_feature (82)..(82): Cys or Gln or Glu
  misc_feature (83)..(83): Val or Gly or Phe
  misc_feature (84)..(84): Ala or Leu or Arg
  misc_feature (85)..(85): Leu or Val or Ile
  misc_feature (87)..(87): Leu or Ile or Lys
  misc_feature (88)..(88): Ala or Arg or Thr
  misc_feature (89)..(89): Ser or Arg or Absent
  misc_feature (90)..(90): Leu or Glu or Absent
  misc_feature (91)..(91): Gly or Arg or Absent
  misc_feature (92)..(92): Ser or Arg or Absent
  misc_feature (93)..(93): Pro or Arg or Absent
  misc_feature (94)..(94): Met or Phe or Absent
  misc_feature (95)..(95): Thr or Cys or Absent
  misc_feature (96)..(96): Ser or Gly or Absent
  misc_feature (97)..(97): Ile or Leu or Absent
  misc_feature (98)..(98): Arg or Absent
  misc_feature (99)..(99): Arg or Leu or Absent
  misc_feature (100)..(100): Ser or Arg or Absent
  misc_feature (101)..(101): Thr or Arg or Absent
  misc_feature (102)..(102): Asp or Glu
  misc_feature (103)..(103): Ser or Arg or Lys
  misc_feature (104)..(104): Ala or Leu
  misc_feature (105)..(105): Gly or Lys or Ser
  misc_feature (106)..(106): Ser or Gln or Ala
  misc_feature (107)..(107): Cys or Gly or Ser
  misc_feature (108)..(108): Arg or Pro
  misc_feature (109)..(109): Ser or Arg
  misc_feature (111)..(111): Met or Ser
  misc_feature (112)..(112): Arg or Pro or Gly
  misc_feature (113)..(113): Leu or Trp or Val
  misc_feature (114)..(114): Pro or Trp or Asp
  misc_feature (115)..(115): Thr or Ala
  misc_feature (116)..(116): Pro or Ala or Ser
  misc_feature (117)..(117): Pro or Ala or Ser
  misc_feature (118)..(118): Ser or Ala
  misc_feature (119)..(119): Thr or Arg or Asn
  misc_feature (120)..(120): Pro or Ser or Absent
  misc_feature (121)..(121): Ala or Arg or Absent
  misc_feature (122)..(122): Ser or Ala or Absent
  misc_feature (123)..(123): Phe or Trp or Absent
  misc_feature (124)..(124): Ile or Arg or Absent
  misc_feature (125)..(125): Arg or Absent
  misc_feature (126)..(126): Thr or Absent
  misc_feature (127)..(127): Ile or Absent
  misc_feature (128)..(128): Ser or Absent
  misc_feature (129)..(129): Met or Absent
  misc_feature (130)..(130): Met or Absent
  misc_feature (131)..(131): Ile or Absent
  misc_feature (132)..(132): Phe or Absent
  misc_feature (133)..(133): Thr or Absent
  misc_feature (134)..(134): Thr or Absent
  misc_feature (135)..(135): Met or Absent
  misc_feature (136)..(136): Ala or Absent
  misc_feature (137)..(137): Pro or Absent
  misc_feature (138)..(138): Ser or Absent
  misc_feature (139)..(139): Ser or Absent
  misc_feature (140)..(140): Arg or Absent
  misc_feature (141)..(141): Lys or Absent
  misc_feature (142)..(142): Phe or Absent
  misc_feature (143)..(143): Ser or Absent
  misc_feature (144)..(144): Leu or Absent
  misc_feature (145)..(145): Ser or Lys or Absent
  misc_feature (146)..(146): Ala or Met or Absent
  misc_feature (147)..(147): Pro or Ala or Absent
  misc_feature (148)..(148): Cys or Met or Absent
  misc_feature (149)..(149): Pro or Arg or Absent
  misc_feature (150)..(150): Val or Trp or Absent
  misc_feature (151)..(151): Val or Arg or Absent
  misc_feature (152)..(152): Ser or Arg or Absent
  misc_feature (153)..(153): Ile or Absent
  misc_feature (154)..(154): Ile or Arg or Absent
  misc_feature (155)..(155): Arg or Gly or Absent
  misc_feature (156)..(156): Cys or Ala
  misc_feature (157)..(157): Val or Arg or Ile
  misc_feature (158)..(158): Ser or Pro
  misc_feature (208)..(208): Arg or Absent
  misc_feature (209)..(209): Asp or Absent
  misc_feature (210)..(210): Ala or Absent
  misc_feature (211)..(211): Pro or Absent
  misc_feature (212)..(212): Asp or Absent
  misc_feature (213)..(213): Asp or Absent
  misc_feature (214)..(214): Gly or Absent
  misc_feature (215)..(215): Asp or Absent
  misc_feature (216)..(216): Asp or Absent
  misc_feature (217)..(217): Arg or Absent
  misc_feature (218)..(218): Ala or Absent
  misc_feature (219)..(219): Arg or Absent
  misc_feature (220)..(220): Arg or Absent
  misc_feature (221)..(221): Ala or Absent
  misc_feature (222)..(222): Gln or Absent
  misc_feature (223)..(223): Gly or Absent
  misc_feature (224)..(224): Glu or Absent
  misc_feature (225)..(225): Leu or Absent
  misc_feature (226)..(226): Leu or Absent
  misc_feature (227)..(227): Pro or Absent
  misc_feature (228)..(228): Arg or Absent
  misc_feature (229)..(229): Arg or Absent
  misc_feature (230)..(230): Arg or Absent
  misc_feature (231)..(231): Arg or Absent
  misc_feature (232)..(232): Leu or Absent
  misc_feature (233)..(233): His or Absent
  misc_feature (234)..(234): Gly or Absent
  misc_feature (235)..(235): Gly or Absent
  misc_feature (236)..(236): Glu or Absent
  misc_feature (237)..(237): Asp or Absent
  misc_feature (238)..(238): His or Absent
  misc_feature (239)..(239): His or Absent
  misc_feature (240)..(240): Asp or Absent
  misc_feature (241)..(241): Gly or Arg
  misc_feature (242)..(242): Pro or Tyr
  misc_feature (243)..(243): Asp or Cys
  misc_feature (244)..(244): Glu or Ser or Val
  misc_feature (245)..(245): Ala or Ser or Gly
  misc_feature (246)..(246): Gly or Tyr
  misc_feature (247)..(247): Arg or Ser or Thr
  misc_feature (248)..(248): Gly or Ser
  misc_feature (249)..(249): Gly or Ser or Absent
  misc_feature (250)..(250): Gly or Ser or Absent
  misc_feature (251)..(251): Arg or Pro or Absent
  misc_feature (252)..(252): Gly or Ser or Absent
  misc_feature (253)..(253): Arg or Leu or Absent
  misc_feature (254)..(254): Glu or His or Absent
  misc_feature (255)..(255): Pro or Arg or Absent
  misc_feature (256)..(256): His or Absent
  misc_feature (257)..(257): Gln or Leu or Absent
  misc_feature (258)..(258): Gly or Pro or Absent
  misc_feature (259)..(259): Ser or Pro or Absent
  misc_feature (260)..(260): Ala or Gly or Absent
  misc_feature (261)..(261): Gly or Ser or Absent
  misc_feature (262)..(262): Ala or Absent
  misc_feature (263)..(263): Arg or Thr or Absent
  misc_feature (264)..(264): Arg or Ile
  misc_feature (265)..(265): Val or Arg or Tyr
  misc_feature (266)..(266): Arg or Ser
  misc_feature (267)..(267): Ala or Pro or Ser
  misc_feature (268)..(268): Pro or His
  misc_feature (269)..(269): Pro or Arg or Lys
  misc_feature (270)..(270): Asp or Arg or Thr
  misc_feature (271)..(271): Gly or Gln or Trp
  misc_feature (272)..(272): Arg or Pro or Thr
  misc_feature (273)..(273): His or Trp or Cys
  misc_feature (274)..(274): Gly or Thr
  misc_feature (275)..(275): Ala or Leu
  misc_feature (276)..(276): Gln or Leu
  misc_feature (277)..(277): Gly or Pro or Ser
  misc_feature (278)..(278): Cys or Ile or Phe
  misc_feature (279)..(279): Gln or Ser or Leu
  misc_feature (280)..(280): Gly or Ser or Leu
  misc_feature (281)..(281): Lys or Arg
  misc_feature (282)..(282): Gly or Ser or Asp
  misc_feature (283)..(283): His or Lys or Ser
  misc_feature (284)..(284): Thr or Glu
  misc_feature (285)..(285): Cys or Thr or Leu
  misc_feature (286)..(286): Ser or Lys
  misc_feature (287)..(287): Arg or Pro
  misc_feature (288)..(288): Gly or Absent
  misc_feature (289)..(289): Phe or Absent
  misc_feature (290)..(290): Glu or Absent
  misc_feature (291)..(291): Leu or Absent
  misc_feature (292)..(292): His or Absent
  misc_feature (293)..(293): Pro or Absent
  misc_feature (294)..(294): Gly or Absent
  misc_feature (295)..(295): Gly or Absent
  misc_feature (296)..(296): Gln or Absent
  misc_feature (297)..(297): Thr or Absent
  misc_feature (298)..(298): Phe or Absent
  misc_feature (299)..(299): Arg or Absent
  misc_feature (300)..(300): Leu or Absent
  misc_feature (301)..(301): Gly or Absent
  misc_feature (302)..(302): Ala or Absent
  misc_feature (303)..(303): Gly or Absent
  misc_feature (304)..(304): Arg or Absent
  misc_feature (305)..(305): Leu or Absent
  misc_feature (306)..(306): Arg or Thr or Gln
  misc_feature (307)..(307): Gly or Ser
  misc_feature (308)..(308): Leu or Phe
  misc_feature (309)..(309): Leu or Ser or Gln
  misc_feature (310)..(310): Ser or Thr or Pro
  misc_feature (311)..(311): Cys or Tyr
  misc_feature (312)..(312): Arg or Gln
  misc_feature (313)..(313): Gly or Asn or Ala
  misc_feature (314)..(314): Met or Lys or Gly
  misc_feature (315)..(315): Ser or Thr or Val
  misc_feature (316)..(316): Tyr or Leu or Gly
  misc_feature (317)..(317): Gly or Ser or Tyr
  misc_feature (318)..(318): His or Leu or Phe
  misc_feature (319)..(319): Lys or Asn or Ser
  misc_feature (320)..(320): Gln or Leu or Val
  misc_feature (321)..(321): Ser or Gly
  misc_feature (322)..(322): His or Tyr
  misc_feature (323)..(323): Gln or Val or Ala
  misc_feature (324)..(324): Cys or Ile or Trp
  misc_feature (325)..(325): Cys or Phe or Arg
  misc_feature (326)..(326): Thr or Ile or Gly
  misc_feature (327)..(327): His or Trp or Phe
  misc_feature (328)..(328): Val or Phe or Ile
  misc_feature (329)..(329): Gln or Pro
  misc_feature (330)..(330): Ser or Arg
  misc_feature (331)..(331): Lys or Asn or His
  misc_feature (332)..(332): Thr or Pro or Leu
  misc_feature (333)..(333): Ile or Thr or Asp
  misc_feature (334)..(334): Arg or Ser or His
  misc_feature (335)..(335): Arg or Glu or Ala
  misc_feature (336)..(336): Glu or Ser or Ala
  misc_feature (337)..(337): Ser or Leu or Pro
  misc_feature (338)..(338): Glu or Ser
  misc_feature (339)..(339): Ser or Leu or Gly
  misc_feature (340)..(340): Ser or Arg or Gln
  misc_feature (341)..(341): Arg or Leu or Absent
  misc_feature (342)..(342): His or Lys or Absent
  misc_feature (343)..(343): Gly or Asp or Absent
  misc_feature (344)..(344): Pro or Ser or Absent
  misc_feature (345)..(345): His or Gln or Absent
  misc_feature (346)..(346): Ser or Glu or Absent
  misc_feature (347)..(347): Ser or Asn or Absent
  misc_feature (348)..(348): Lys or Met or Absent
  misc_feature (349)..(349): Cys or Val or Absent
  misc_feature (350)..(350): Ala or Arg or Absent
  misc_feature (351)..(351): Ser or Absent
  misc_feature (352)..(352): Gln or Ser or Absent
  misc_feature (353)..(353): His or Ala or Absent
  misc_feature (354)..(354): Ser or Cys or Absent
  misc_feature (355)..(355): Thr or Phe or Absent
  misc_feature (356)..(356): Lys or Pro or Absent
  misc_feature (357)..(357): His or Arg or Absent
  misc_feature (358)..(358): Ala or Glu or Absent
  misc_feature (359)..(359): Val or Tyr or Absent
  misc_feature (360)..(360): Leu or Arg or Absent
  misc_feature (361)..(361): Cys or Absent
  misc_feature (362)..(362): Ser or Absent
  misc_feature (363)..(363): Trp or Absent
  misc_feature (364)..(364): Trp or Absent
  misc_feature (365)..(365): Leu or Absent
  unsure (1)..(365): unsure at all Xaa locations
XXXXXXXXXXXXXXXXXXXXXXXXXXXXXXXXXXXXXXXSXXXXXLXXXXXXXXXXXXXXXXXXXXXXXXXXXXXXXXXXXXXXXSXXXXXXXXXXXXXXXXXXXXXXXLXXXXXXXXXXXXXXXXXXXXXXXXXXXXXXXXXXXXXXXXXXXXXXXXKYCDRVNALSRYLLPHITNNINTHHSRRHPLDHYSHTTDLLIHAAACRSXXXXXXXXXXXXXXXXXXXXXXXXXXXXXXXXXXXXXXXXXXXXXXXXXXXXXXXXXXXXXXXXXXXXXXXXXXXXXXXXXXXXXXXXXXXXXXXXXXXXXXXXXXXXXXXXXXXXXXXXXXXXXXXXXXXXXXXXXXXXXXXXXXXXXXXXXXXXXX

SEQ ID NO: 36458 - protein, 361 aa, Artificial sequence
  consensus sequence of seq id no: 386  and its homologs
  misc_feature (1)..(1): Absent or Met
  misc_feature (11)..(11): Absent or Val or Met
  misc_feature (12)..(12): Absent or Gly or Cys
  misc_feature (15)..(15): Absent or Ile or Val
  misc_feature (17)..(17): Absent or Leu or Asn or Thr
  misc_feature (18)..(18): Absent or Cys or Ser
  misc_feature (19)..(19): Absent or Pro or Thr
  misc_feature (20)..(20): Absent or Thr or Asp
  misc_feature (21)..(21): Absent or Thr or Ser
  misc_feature (22)..(22): Absent or Ser or Phe
  misc_feature (23)..(23): Absent or Gly
  misc_feature (24)..(24): Absent or Tyr
  misc_feature (25)..(25): Absent or Thr
  misc_feature (26)..(26): Absent or Thr
  misc_feature (27)..(27): Absent or Asp
  misc_feature (28)..(28): Absent or Gln or Glu
  misc_feature (29)..(29): Absent or Pro or Gln
  misc_feature (33)..(33): Absent or Arg or Gly
  misc_feature (36)..(36): Absent or Gly
  misc_feature (37)..(37): Absent or Arg or Gly or Ser
  misc_feature (38)..(38): Absent or Glu or Asn
  misc_feature (39)..(39): Absent or Phe or Tyr
  misc_feature (44)..(44): Absent or Glu or Asp
  misc_feature (47)..(47): Absent or Glu or Asp
  misc_feature (49)..(49): Absent or Glu or Asp
  misc_feature (50)..(50): Absent or Glu or Gly or Ala
  misc_feature (51)..(51): Absent or Glu or Thr
  misc_feature (52)..(52): Absent or Glu or Ile or Leu
  misc_feature (53)..(53): Absent or Ala or Val or Ile
  misc_feature (54)..(54): Absent or Val or Ile or Glu
  misc_feature (55)..(55): Absent or Thr or Val or Glu
  misc_feature (56)..(56): Absent or Glu or Tyr
  misc_feature (57)..(57): Absent or Glu or Ser
  misc_feature (58)..(58): Absent or Gly
  misc_feature (59)..(59): Absent or Asn
  misc_feature (60)..(60): Absent or Arg or His
  misc_feature (61)..(61): Absent or Gly or His
  misc_feature (62)..(62): Absent or Gln or His
  misc_feature (63)..(63): Absent or Thr or Val or Met
  misc_feature (66)..(66): Absent or Ala or Ser
  misc_feature (73)..(73): Absent or Ser or Arg or Lys
  misc_feature (74)..(74): Absent or Ile or Val
  misc_feature (75)..(75): Absent or Asn or Asp
  misc_feature (96)..(96): Absent or Val or Thr
  misc_feature (100)..(100): Absent or Leu or Gln
  misc_feature (105)..(105): Absent or Gln or Glu
  misc_feature (131)..(131): Absent or Val or Leu
  misc_feature (134)..(134): Absent or Thr or Ser or Gly
  misc_feature (148)..(148): Absent or Arg or Ser
  misc_feature (151)..(151): Absent or Glu or Asp
  misc_feature (155)..(155): Absent or Met or Gln or Leu
  misc_feature (156)..(156): Absent or Gln or Glu or Lys
  misc_feature (158)..(158): Absent or Ser or Gly
  misc_feature (160)..(160): Absent or Leu or Met or Ile
  misc_feature (162)..(162): Absent or Ser or Ala or Thr or Gly
  misc_feature (164)..(164): Absent or Leu or Ile or Val
  misc_feature (168)..(168): Absent or Glu or Gly or Asp
  misc_feature (169)..(169): Absent or Glu or Gly
  misc_feature (170)..(170): Absent or Glu or Val or Asp
  misc_feature (171)..(171): Absent or Glu or Asn
  misc_feature (172)..(172): Absent or Glu or Lys or Asn
  misc_feature (173)..(173): Absent or Asp
  misc_feature (174)..(174): Absent or Met or Asp
  misc_feature (175)..(175): Absent or Glu or Met
  misc_feature (176)..(176): Absent or Glu or Lys or Asp
  misc_feature (177)..(177): Absent or Glu or Met
  misc_feature (178)..(178): Absent or Glu or Asn
  misc_feature (180)..(180): Absent or Lys or Asn or Ala or Ser or Val
  misc_feature (181)..(181): Absent or Ala or Lys
  misc_feature (182)..(182): Absent or Val or Ala
  misc_feature (183)..(183): Absent or Lys or Thr or Ile
  misc_feature (184)..(184): Absent or Met or Thr or Ala
  misc_feature (186)..(186): Absent or Ser or Cys or Gly
  misc_feature (187)..(187): Absent or Asp or Val
  misc_feature (188)..(188): Absent or Phe or Val or Ile or Lys
  misc_feature (189)..(189): Absent or Ser or Glu
  misc_feature (190)..(190): Absent or Val or Ala or Glu
  misc_feature (191)..(191): Absent or Lys or Val or Glu
  misc_feature (192)..(192): Absent or Glu or Lys or Val
  misc_feature (193)..(193): Absent or Glu or His
  misc_feature (194)..(194): Absent or Glu or Lys
  misc_feature (195)..(195): Absent or Asp or Val or Asn or Glu or Thr
  misc_feature (196)..(196): Absent or Ser or Asp
  misc_feature (197)..(197): Absent or Leu or Pro or Ser
  misc_feature (198)..(198): Absent or Pro
  misc_feature (199)..(199): Absent or Glu
  misc_feature (200)..(200): Absent or Asn or Glu or Lys
  misc_feature (201)..(201): Absent or Ile or Leu
  misc_feature (202)..(202): Absent or Thr
  misc_feature (203)..(203): Absent or Glu or Asp
  misc_feature (204)..(204): Absent or Pro or Ala or Val or Ile
  misc_feature (209)..(209): Absent or Pro or Leu
  misc_feature (211)..(211): Absent or Leu or Ala or Phe
  misc_feature (216)..(216): Absent or Asp or Thr or Ser
  misc_feature (217)..(217): Absent or Ser or Gly
  misc_feature (222)..(222): Absent or Arg
  misc_feature (233)..(233): Absent or Leu or Asn
  misc_feature (234)..(234): Absent or Lys or Ser
  misc_feature (235)..(235): Absent or Ala or Thr or Pro
  misc_feature (236)..(236): Absent or Ala or Val
  misc_feature (237)..(237): Absent or Ala or Pro or Val
  misc_feature (238)..(238): Absent or Ser or Asp or Glu
  misc_feature (239)..(239): Absent or Ser
  misc_feature (240)..(240): Absent or Phe or Val
  misc_feature (241)..(241): Absent or Ala
  misc_feature (242)..(242): Absent or Ala
  misc_feature (245)..(245): Absent or Gly
  misc_feature (250)..(250): Absent or Ser or Cys
  misc_feature (255)..(255): Absent or Val or Leu
  misc_feature (258)..(258): Absent or Glu or Asp
  misc_feature (260)..(260): Absent or Ser or Thr
  misc_feature (263)..(263): Asn or Glu or Asp
  misc_feature (264)..(264): Asn or Absent
  misc_feature (265)..(265): Gly or Absent
  misc_feature (266)..(266): Arg or Absent
  misc_feature (267)..(267): Leu or Val
  misc_feature (269)..(269): Pro or Val or Ala
  misc_feature (270)..(270): Absent or Ala or Gly or Pro
  misc_feature (271)..(271): Absent or Ala or Pro
  misc_feature (273)..(273): Val or Thr or Ala or Pro
  misc_feature (276)..(276): Thr or Pro or Ala
  misc_feature (279)..(279): Ser or Gly or Asn
  misc_feature (286)..(286): Thr or Met
  misc_feature (293)..(293): Glu or Asp
  misc_feature (304)..(304): Absent or Gly
  misc_feature (315)..(315): His or Absent or Asn
  misc_feature (319)..(319): Cys or Ala or Thr or Absent
  misc_feature (320)..(320): Leu or Val or Absent or Ser
  misc_feature (322)..(322): Arg or His or Gln or Absent
  misc_feature (323)..(323): Ser or Absent
  misc_feature (324)..(324): Ile or Absent
  misc_feature (326)..(326): Thr or Asn or Absent
  misc_feature (327)..(327): Phe or Absent
  misc_feature (328)..(328): Glu or Absent
  misc_feature (329)..(329): Glu or Absent
  misc_feature (330)..(330): Ile or Absent
  misc_feature (331)..(331): Cys or Absent
  misc_feature (332)..(332): Phe or Absent
  misc_feature (333)..(333): Ile or Absent
  misc_feature (334)..(334): Pro or Absent
  misc_feature (335)..(335): Lys or Absent
  misc_feature (336)..(336): Phe or Absent
  misc_feature (337)..(337): Gly or Absent
  misc_feature (338)..(338): Cys or Absent
  misc_feature (339)..(339): Leu or Absent
  misc_feature (340)..(340): Leu or Absent
  misc_feature (341)..(341): Phe or Absent
  misc_feature (342)..(342): Leu or Absent
  misc_feature (343)..(343): Val or Absent
  misc_feature (344)..(344): Leu or Absent
  misc_feature (345)..(345): Pro or Absent
  misc_feature (346)..(346): Asn or Absent
  misc_feature (347)..(347): Trp or Absent
  misc_feature (348)..(348): Gly or Absent
  misc_feature (349)..(349): Lys or Absent
  misc_feature (350)..(350): Asn or Absent
  misc_feature (351)..(351): Gln or Absent
  misc_feature (352)..(352): Lys or Absent
  misc_feature (353)..(353): Lys or Absent
  misc_feature (354)..(354): Arg or Absent
  misc_feature (355)..(355): Gly or Absent
  misc_feature (356)..(356): Ala or Absent
  misc_feature (357)..(357): Lys or Absent
  misc_feature (358)..(358): Arg or Absent
  misc_feature (359)..(359): Val or Absent
  misc_feature (360)..(360): Gly or Absent
  misc_feature (361)..(361): Asn or Absent
  unsure (1)..(361): unsure at all Xaa locations
XMKRLSSSDSXXGLXSXXXXXXXXXXXXXSPRXYGXXXXQSMLXGYXEXXXXXXXXXXXXXXXGLXEKKRRLXXXQVKALEKNFELENKLEPERKXKLAXELGLXPRQVAVWFQNRRARWKTKQLEKDYGXLKXQYDSLRHNFDSLRXDNXSLLXXIXKXKXKXNGEXXXXXXXXXXXNXXXXXEXXXXXXXXXXXXXXXXXXXPSSPXQXLEHSXXFNYRXSFTDLRDLLPXXXXXXXXXXAGXSSDSXDSSAXLNXEXSSXXXXXTXXXPXTVXGGXFLQFVKXEQTEDHXDFLSGEEACGXFFSDEQPPSLXWYSXXDXXXWXXXXXXXXXXXXXXXXXXXXXXXXXXXXXXXXXXXX

SEQ ID NO: 36459 - protein, 1591 aa, Artificial sequence
  consensus sequence of seq id no: 404 and its homologs
  misc_feature (1)..(1): Absent or Met
  misc_feature (2)..(2): Absent or Lys
  misc_feature (3)..(3): Absent or Gln
  misc_feature (4)..(4): Absent or Gln
  misc_feature (5)..(5): Absent or Lys
  misc_feature (6)..(6): Absent or Gln
  misc_feature (7)..(7): Absent or Leu
  misc_feature (8)..(8): Absent or Ile
  misc_feature (9)..(9): Absent or Lys
  misc_feature (10)..(10): Absent or Glu
  misc_feature (11)..(11): Absent or Asp
  misc_feature (12)..(12): Absent or Thr
  misc_feature (13)..(13): Absent or Met
  misc_feature (14)..(14): Absent or Asp
  misc_feature (15)..(15): Absent or Asn
  misc_feature (16)..(16): Absent or Asn
  misc_feature (17)..(17): Absent or Ile
  misc_feature (18)..(18): Absent or Asp
  misc_feature (19)..(19): Absent or Lys
  misc_feature (20)..(20): Absent or Leu
  misc_feature (21)..(21): Absent or Thr
  misc_feature (22)..(22): Absent or Pro
  misc_feature (23)..(23): Absent or Asn
  misc_feature (24)..(24): Absent or Trp
  misc_feature (25)..(25): Absent or Cys
  misc_feature (26)..(26): Absent or Ala
  misc_feature (27)..(27): Absent or Trp
  misc_feature (28)..(28): Absent or Lys
  misc_feature (29)..(29): Absent or Asn
  misc_feature (30)..(30): Absent or Asp
  misc_feature (31)..(31): Absent or Asn or Met
  misc_feature (32)..(32): Absent or Asn or Ala
  misc_feature (33)..(33): Absent or Leu or Trp
  misc_feature (34)..(34): Absent or Cys or Ala
  misc_feature (35)..(35): Absent or Ser or Phe
  misc_feature (36)..(36): Absent or Gly or Val
  misc_feature (37)..(37): Absent or Thr or Leu
  misc_feature (38)..(38): Absent or Ser or Met or Val
  misc_feature (39)..(39): Absent or His or Thr
  misc_feature (40)..(40): Absent or Glu or Ser
  misc_feature (41)..(41): Absent or Gln or His
  misc_feature (42)..(42): Absent or Arg or Glu
  misc_feature (43)..(43): Absent or Asn or Gln
  misc_feature (44)..(44): Absent or His or Arg
  misc_feature (45)..(45): Absent or Arg or Asn
  misc_feature (46)..(46): Absent or Leu or His
  misc_feature (47)..(47): Absent or Leu or Gln
  misc_feature (48)..(48): Absent or Thr or Leu
  misc_feature (49)..(49): Absent or Lys or Leu
  misc_feature (50)..(50): Absent or Gln or Thr or Ser
  misc_feature (51)..(51): Absent or Pro or Asn
  misc_feature (52)..(52): Absent or Pro
  misc_feature (53)..(53): Absent or Cys or Leu or Pro
  misc_feature (54)..(54): Absent or Lys or Val
  misc_feature (55)..(55): Absent or Leu or Asn
  misc_feature (56)..(56): Absent or Lys or Phe or Leu
  misc_feature (57)..(57): Absent or Ala or Lys
  misc_feature (58)..(58): Absent or Thr or Gln
  misc_feature (59)..(59): Absent or Glu or Pro
  misc_feature (60)..(60): Absent or Ala or Lys
  misc_feature (61)..(61): Absent or Lys or Arg
  misc_feature (62)..(62): Absent or Tyr or Arg
  misc_feature (63)..(63): Absent or Ala or Lys
  misc_feature (64)..(64): Absent or Tyr or Glu or Met
  misc_feature (65)..(65): Absent or Leu or Met or Val
  misc_feature (66)..(66): Absent or Glu or Val or Phe
  misc_feature (67)..(67): Absent or Met or Arg or Phe or Gln
  misc_feature (68)..(68): Absent or Glu or Val or Met or Leu or Gln or Lys
  misc_feature (69)..(69): Absent or Ala or Ser or Val or Met or Lys or Arg
  misc_feature (70)..(70): Absent or Gln or His or Arg or Phe or Leu or Tyr or Ser or Val
  misc_feature (71)..(71): Absent or Ser or Lys or Gln or Met or Val or His
  misc_feature (72)..(72): Absent or His or Cys or Arg or Lys or Asn or Val or Ser
  misc_feature (73)..(73): Absent or Thr or Met or Val or Arg or Ser or Lys or Phe or Leu
  misc_feature (74)..(74): Absent or Val or Glu or Leu or Pro or Gln or Lys
  misc_feature (75)..(75): Absent or Gly or Asp or Glu or Lys or Leu or Met
  misc_feature (76)..(76): Absent or Asp or Cys or Phe or Tyr or Asn or Glu
  misc_feature (77)..(77): Absent or Val or Gly or Leu or Cys or Ser or Ala
  misc_feature (78)..(78): Absent or Phe or Val or Tyr or Asp or Ser or Gly or Cys
  misc_feature (79)..(79): Absent or Leu or Asp or Ala or Ser or Asn or Arg or Tyr or Val or Gly
  misc_feature (80)..(80): Absent or Gly or Ile or Ser
  misc_feature (81)..(81): Absent or Tyr or Phe or Asn or Ser or Gly
  misc_feature (82)..(82): Absent or Asn or Gln or Leu or Glu or His or Asp or Gly or Lys
  misc_feature (83)..(83): Absent or Arg or Leu or Val or Ala or Ile or Phe
  misc_feature (84)..(84): Absent or Ser or Pro or Asp or Ala
  misc_feature (85)..(85): Absent or Ile or Val or Ser or Trp or Ala or Pro or His or Phe or Thr or Asn or Glu
  misc_feature (86)..(86): Absent or Leu or Val or Asn or Thr or Ile or Met or Pro or Gln
  misc_feature (87)..(87): Absent or Ser or Pro or Ala or Asn
  misc_feature (88)..(88): Absent or Gly or Arg or Lys or Ile
  misc_feature (89)..(89): Absent or Ala or Gly or Pro or Val
  misc_feature (90)..(90): Absent or Leu or Cys or Pro or Lys
  misc_feature (91)..(91): Absent or Arg or Ala or Lys
  misc_feature (92)..(92): Absent or Ser or Thr or Ala or Pro
  misc_feature (93)..(93): Absent or Thr or Pro or Ala or Arg or Leu or Val or Ile or Ser or Cys
  misc_feature (94)..(94): Absent or Gln or Arg or Ser
  misc_feature (95)..(95): Absent or Glu or Gly or Lys or Ala or Pro or Thr or Val or Arg or Ser
  misc_feature (96)..(96): Absent or Lys or Arg
  misc_feature (97)..(97): Absent or Glu or Arg or Gly or Lys or Ala or Val
  misc_feature (98)..(98): Absent or Glu or Leu or Ser or Arg or Pro or Lys or Ile
  misc_feature (99)..(99): Absent or Ala or Lys or Ile or Gly or Ser or Arg or Asn or Val or Tyr
  misc_feature (100)..(100): Absent or Ile or Glu or Pro or Ser or Leu or Lys or Ala or Thr or Arg
  misc_feature (101)..(101): Absent or Lys or Met or Ile or Ser or Phe or Arg or Cys or His or Gly
  misc_feature (102)..(102): Absent or Gln or Arg or Lys or Pro or Ile
  misc_feature (103)..(103): Absent or Gln or Lys or Ile or Arg or Val or Thr or Asp or Glu
  misc_feature (104)..(104): Absent or Thr or Ser or Lys or Pro or Leu or Phe or Glu or His or Ala
  misc_feature (105)..(105): Absent or Asn or Lys or Ser or Leu or Pro or Val or His or Ala or Asp or Gln
  misc_feature (106)..(106): Absent or Cys or Glu or Asp or Gly or Ser or Asn
  misc_feature (107)..(107): Absent or Lys or Asp or Asn or Glu or Pro
  misc_feature (108)..(108): Absent or Lys or Asp or Asn or Ser or His or Gly or Thr or Gln or Ala or Pro
  misc_feature (109)..(109): Absent or Arg or Gln or Asn or Glu or Thr or Lys or Val
  misc_feature (110)..(110): Absent or Pro or Arg or Met or Lys or Ile or Thr or Val or Gln
  misc_feature (111)..(111): Absent or Arg or Ser or Cys or His or Tyr or Phe or Ile
  misc_feature (112)..(112): Absent or Phe or Glu or Ala or Ser or Cys
  misc_feature (113)..(113): Absent or Phe or Ile or Ala
  misc_feature (114)..(114): Absent or Glu or Asp or Ile
  misc_feature (115)..(115): Absent or Leu or Val or Ile or Asp
  misc_feature (116)..(116): Absent or Leu
  misc_feature (117)..(117): Absent or Ala or Leu
  misc_feature (118)..(118): Absent or Thr or Gln or Ser or Ile or Ala
  misc_feature (119)..(119): Absent or Val or Leu
  misc_feature (120)..(120): Absent or Ala
  misc_feature (121)..(121): Absent or Gly
  misc_feature (122)..(122): Absent or Gln or Arg or His or Glu or Lys or Asn or Ser
  misc_feature (123)..(123): Absent or Phe or Leu or Ile
  misc_feature (124)..(124): Absent or Leu or Ser or Pro or Phe
  misc_feature (125)..(125): Absent or Gln or Gly or Phe or Leu or His or Glu or Asp
  misc_feature (126)..(126): Absent or Asn or Glu or Asp
  misc_feature (127)..(127): Absent or Asp or Arg or Ser or Glu or Lys or Gly
  misc_feature (128)..(128): Absent or Gly
  misc_feature (129)..(129): Absent or Asn or Glu or Val or Ala
  misc_feature (130)..(130): Absent or Glu or Ser or Gly
  misc_feature (131)..(131): Absent or Thr or Ser or Lys or Asn
  misc_feature (132)..(132): Absent or Gly or Ser or Thr or Ala or Pro or Lys or Leu
  misc_feature (133)..(133): Absent or Ser or Ala or Pro or Thr or Gly
  misc_feature (134)..(134): Absent or Ser or Pro or Met or Gly or Asp or Ala or Thr or Asn
  misc_feature (135)..(135): Absent or Leu or Thr or Ile or Ser or Asn or Val or Ala or Met
  misc_feature (136)..(136): Absent or Met or Asn or Ser or Val or Thr
  misc_feature (137)..(137): Absent or Ser or Thr or Asp or Asn or Val or Ala or Tyr
  misc_feature (138)..(138): Absent or Ile or Ala or Met or Thr or Ser or Val or Cys or Gly
  misc_feature (139)..(139): Absent or Asp or Cys or Ser or Gly or Glu or Ala or Phe or Leu or Thr
  misc_feature (140)..(140): Absent or Lys or Gly or Arg or Ser or Ala or Asn or Leu or Pro or Glu or Val
  misc_feature (141)..(141): Absent or Leu or Lys or Asp or Gly or Glu or Asn or Arg or Ala or Val
  misc_feature (142)..(142): Absent or Ile or Asp or Asn or Lys or Glu or Tyr or Ser or Gln or Val or Leu
  misc_feature (143)..(143): Absent or Glu or Leu or Gln or Asp or Asn or Ser or Lys or Ala or Thr
  misc_feature (144)..(144): Absent or Asp or Cys or His or Gln or Ile or Leu or Arg or Thr or Ala
  misc_feature (145)..(145): Absent or His or Asn or Tyr or Cys or Arg or Gly or Ala or Ser or Leu or Pro or Glu or Asp or Val
  misc_feature (146)..(146): Absent or Arg or Val or Ala or Gly or Ile or Asp or Asn or Lys or His or Pro
  misc_feature (147)..(147): Absent or Val or Lys or Ala or Ile or Phe or His or Gly or Cys or Leu or Asn
  misc_feature (148)..(148): Absent or Lys or Asn or Thr or Val or Ile or Ala or Leu or Arg or Ser or Glu or Gly or Asp
  misc_feature (149)..(149): Absent or Glu or Thr or Val or Lys or Asn or Asp or Gly or Tyr or Ala
  misc_feature (150)..(150): Absent or Glu or Ile or Val or His or Asp or Ser or Gly or Cys or Leu or Pro or Arg
  misc_feature (151)..(151): Absent or Phe or Gln or Lys or Ala or Thr or Pro or Ile or Gly or Val
  misc_feature (152)..(152): Absent or Pro or Gln or Cys or Val or Leu or Lys or Ile or Thr or Asp
  misc_feature (153)..(153): Absent or Glu or Lys or Asn or Gln or Ser or Cys or Ala or Ile
  misc_feature (154)..(154): Absent or Glu or Gln or Thr or Lys or Asn or Gly
  misc_feature (155)..(155): Absent or Glu or Val or His or Lys or Gly or Leu or Arg or Gln or Ser or Pro
  misc_feature (156)..(156): Absent or Lys or Asp or Cys or Trp or Gly or Pro or Val or Leu or Gln or Glu
  misc_feature (157)..(157): Absent or Pro or Arg or Lys or Gln or His or Ile or Glu or Ser or Asp
  misc_feature (158)..(158): Absent or Leu or Gly or Asn or Asp or Ala or Met or Glu or Ser
  misc_feature (159)..(159): Absent or Met or Lys or Glu or Asp or Ala or Val or Ser or Asn or Gly or Tyr or Gln
  misc_feature (160)..(160): Absent or Pro or Phe or Asp or Glu or Asn or Gln or Thr or Ala or Met
  misc_feature (161)..(161): Absent or Val or Leu or Lys or Glu or Gly or Thr or Tyr
  misc_feature (162)..(162): Absent or Ala or Ile or Leu or Asn or Ser or Pro or Glu or Gly or Thr or Arg or Lys or His or Gln
  misc_feature (163)..(163): Absent or Leu or Ile or Val or Met or Ser or Thr or Pro or Glu or Phe
  misc_feature (164)..(164): Absent or Ser or Glu or His or Lys or Thr or Arg or Val or Cys
  misc_feature (165)..(165): Absent or Pro or Gln or Ala or Val or Ile or Ser or Asn or Gly or Thr or Lys or His
  misc_feature (166)..(166): Absent or Tyr or Leu or Ile or Glu or Ser or Lys
  misc_feature (167)..(167): Absent or Arg or Leu or Lys or Ala or Thr or Pro or Ile or Asp or Cys or Glu or Phe or Val
  misc_feature (168)..(168): Absent or Gly or Leu or Cys or Gln or Ser or His or Val or Thr or Phe or Met
  misc_feature (169)..(169): Absent or Ser or Glu or Asp or Tyr or Phe or Gln
  misc_feature (170)..(170): Absent or Leu or Pro or Gln or Glu or Asn or Arg or Asp or Lys
  misc_feature (171)..(171): Absent or Ser or Cys or Arg or Gly or Asn or Ile or Pro or Asp
  misc_feature (172)..(172): Absent or Pro or Asn or Asp or Ser or Gly or Lys
  misc_feature (173)..(173): Absent or Cys or Glu or Pro or Ala or Ser or Thr or Asn
  misc_feature (174)..(174): Absent or Gly or Lys or Asn or Asp or Ala or Glu or Ile or Val or Pro
  misc_feature (175)..(175): Absent or Phe or Ala or Thr or Arg or Lys or Gly or Asn or Glu or Val
  misc_feature (176)..(176): Absent or Ser or Phe or Leu or Arg or Lys or Asn or Ile or Cys
  misc_feature (177)..(177): Absent or Ser or Ala or Tyr or Phe or Ile or Gly or Val or Asp or Lys or Arg
  misc_feature (178)..(178): Absent or Val or Cys or Tyr or Phe or Ile or Leu or Ala or Ser
  misc_feature (179)..(179): Absent or Ile or Val or Ser or Leu or Ala or Asn or Thr
  misc_feature (180)..(180): Absent or Asn or Pro or Ser or Arg or Thr
  misc_feature (181)..(181): Absent or Gly or Glu or His or Asp or Leu or Lys or Cys or Asn or Val
  misc_feature (182)..(182): Absent or Lys or Leu or Ala or Pro or Ser or Ile or Phe or Thr or Asn or Arg
  misc_feature (183)..(183): Absent or Val or Gln or Asn or Ser or Leu or Ala or Thr
  misc_feature (184)..(184): Absent or Glu or Gly or Asp or Ser or Ala or His or Gln or Val or Phe or Leu
  misc_feature (185)..(185): Absent or Asn or His or Asp or Gln or Val or Thr or Lys or Leu or Arg or Glu or Pro
  misc_feature (186)..(186): Absent or Glu or Trp or Leu or Ala or Asp or His or Met or Asn or Ser or Thr or Arg
  misc_feature (187)..(187): Absent or Val or His or Ser or Pro or Arg or Lys or Gln or Leu or Cys or Ile or Ala
  misc_feature (188)..(188): Absent or Asp or Gly or Ile or Gln or Ser or Lys or Glu or Asn or Leu or Val
  misc_feature (189)..(189): Absent or Gly or Asn or Gln or Met or Ser or Leu or Pro or Arg or Asp
  misc_feature (190)..(190): Absent or Ala or His or Cys or Lys or Gln or Asn or Val or Phe or Pro
  misc_feature (191)..(191): Absent or Leu or Ser or Tyr or Gly or Ala or Pro or His or Arg or Cys
  misc_feature (192)..(192): Absent or Asn or Tyr or Ser or Cys or Leu or Phe or Thr or Gly or Asp or Glu or Val
  misc_feature (193)..(193): Absent or Lys or Arg or Asn or Leu or Val or Phe or Pro
  misc_feature (194)..(194): Absent or Phe or Glu or Arg or Gly or Asp or Lys or Asn or Thr
  misc_feature (195)..(195): Absent or Leu or Ser or Gln or Glu or Phe or Val or Asp or Lys or Ala or Pro or Asn or Gly
  misc_feature (196)..(196): Absent or His or Lys or Pro or Asn or Leu or Phe or Thr or Ile or Met or Asp or Glu
  misc_feature (197)..(197): Absent or Asn or Ile or Gly or His or Val or Pro or Ser or Tyr or Cys or Asp
  misc_feature (198)..(198): Absent or Gln or Ser or Pro or Cys or Thr or Arg or Leu or His or Asn or Tyr or Asp or Ile
  misc_feature (199)..(199): Absent or Glu or Ser or Pro or Ala or Leu or Ile or Thr or Val or Tyr
  misc_feature (200)..(200): Absent or Ser or Thr or Asn or Asp or Gln or Ile or Lys or Glu or Val or Gly
  misc_feature (201)..(201): Absent or Phe or Ile or Asp or Gly or Asn or Glu or Ser or His or Lys or Gln
  misc_feature (202)..(202): Absent or Asn or His or Leu or Asp or Gly or Phe or Val or Ser or Ile or Thr
  misc_feature (203)..(203): Absent or Ser or Cys or Asn or Ala or Asp or His or Tyr or Pro
  misc_feature (204)..(204): Absent or Gln or Arg or Leu or Cys or Val or Phe or Ile or Gly
  misc_feature (205)..(205): Absent or Gly or Ser or Pro or Leu or Ile or Thr or Asn
  misc_feature (206)..(206): Absent or Ser or Phe or Val or Leu or Ala or Pro or Ile or Glu or Asp or Met
  misc_feature (207)..(207): Absent or Phe or Thr or Ala or Leu or Ser or Arg or His or Gln or Cys or Asp or Val
  misc_feature (208)..(208): Absent or Ala or Ser or His or Thr or Val or Lys or Pro
  misc_feature (209)..(209): Absent or Ser or Ala or Ile or Gly or Val or Thr or Arg or Lys
  misc_feature (210)..(210): Absent or Glu or Val or Leu or Ile or Ser or Thr or Cys or Phe or Ala
  misc_feature (211)..(211): Absent or Arg or Ala or Ile or Thr or Val or Phe or Ser or Glu or Lys
  misc_feature (212)..(212): Absent or Phe or Thr or Lys or Ser or Val or Leu or Ala or Gly
  misc_feature (213)..(213): Absent or Asp or Ser or Pro or Leu or Ile or Cys or Glu
  misc_feature (214)..(214): Absent or Tyr or Leu or Asn or Asp or Ser or Gly or Pro or X or Ala or Val
  misc_feature (215)..(215): Absent or Pro or Cys or Ser or Asp or Val or Leu or Gln
  misc_feature (216)..(216): Absent or Glu or Thr or Ala or Ser or Leu or Asp or Tyr
  misc_feature (217)..(217): Absent or Thr or Asn or Glu or Phe or Ala or Ser or Leu or Lys
  misc_feature (218)..(218): Absent or Ile or Val or Arg or Lys or Leu or Ser or Asp or Glu
  misc_feature (219)..(219): Absent or Tyr or Cys or Phe or Ser or Asn or Val or Lys or Leu or Met or Pro
  misc_feature (220)..(220): Absent or Val or Phe or Asp or Asn or Glu or Ile or Lys or Thr or Ser
  misc_feature (221)..(221): Absent or Ala or Ser or Thr or Gly or Met
  misc_feature (222)..(222): Absent or Glu or Asp or Gln or Lys or Arg or Val or Leu or Cys or Ile
  misc_feature (223)..(223): Absent or Lys or Arg or Ser or Glu or Tyr or Asp
  misc_feature (224)..(224): Absent or Leu or Phe or Met or Asn or Cys or Val or Tyr
  misc_feature (225)..(225): Absent or Val or Asp or Gly or Glu or Cys or Met or Thr
  misc_feature (226)..(226): Absent or Val or Asn or Asp or Lys or Leu
  misc_feature (227)..(227): Absent or Val or Asp or Gly or Ser or Pro or Lys or Glu or Thr or Ala
  misc_feature (228)..(228): Absent or Asn or Cys or Lys or Gln or Glu or Leu or Val or Asp
  misc_feature (229)..(229): Absent or Ser or Arg or Gly or Lys or Asn or Leu
  misc_feature (230)..(230): Absent or Lys or Gln or His or Arg or Ile or Val or Ser or X or Gly
  misc_feature (231)..(231): Absent or Asn or Lys or Ser or Phe or Thr or Cys or Ala
  misc_feature (232)..(232): Absent or Ala or Asp or Glu or Lys or Ser or Asn
  misc_feature (233)..(233): Absent or Gly or Arg or Met or Ile or Val or Asp
  misc_feature (234)..(234): Absent or Gly or Glu or Asp or Lys or Phe
  misc_feature (235)..(235): Absent or Ser or Thr or Asn or Ala or Gly
  misc_feature (236)..(236): Absent or Ser or Phe or Val or Ala or Glu or Asp or Lys
  misc_feature (237)..(237): Absent or Ser or Pro or Ala or Thr or Gly or Val
  misc_feature (238)..(238): Absent or Cys or Ser or Asn or Lys or Pro
  misc_feature (239)..(239): Absent or Glu or Lys or Leu or Phe or Cys
  misc_feature (240)..(240): Absent or Met or Val or Ala or Asn or His or Pro
  misc_feature (241)..(241): Absent or Asn or Ala or Glu or Ser or His or Phe
  misc_feature (242)..(242): Absent or Gly or Val or Leu or Lys or Ala
  misc_feature (243)..(243): Absent or Glu or Asp or Gly or Leu or Ala or Ile or Val or Lys
  misc_feature (244)..(244): Absent or Ser or Phe or Lys or Glu or Val or Ile
  misc_feature (245)..(245): Absent or Ser or Pro or Gly or Asp or Glu or Ala
  misc_feature (246)..(246): Absent or His or Cys or Arg or Glu or Asp or Thr or Gly
  misc_feature (247)..(247): Absent or Ala or Cys or His or Tyr or Phe or Thr or Ser or Gly or Arg
  misc_feature (248)..(248): Absent or Arg or Gly or Ile or Pro or Ser or Tyr or Trp
  misc_feature (249)..(249): Absent or Lys or Ile or Glu or Ser or Ala or Pro or X
  misc_feature (250)..(250): Absent or Ile or Phe or Asp or Leu or Pro
  misc_feature (251)..(251): Absent or Phe or Asp or Gly or Ser or Glu or Cys
  misc_feature (252)..(252): Absent or Lys or Glu or Gly or Asp or Pro or Leu or Ser
  misc_feature (253)..(253): Absent or Gly or Cys or Phe or Leu or Pro or Glu or His or Val
  misc_feature (254)..(254): Absent or Lys or Asn or Tyr or Ser or Cys or Phe or Thr or Glu
  misc_feature (255)..(255): Absent or Val or Leu or Glu or Asn or Asp or Cys or Ile or Ser
  misc_feature (256)..(256): Absent or Glu or Asp or Ser or Gly or Asn or Lys
  misc_feature (257)..(257): Absent or Gly or Ser or Ala or Asn or Lys or Asp
  misc_feature (258)..(258): Absent or Leu or Val or Glu or Ile or Thr or Asn or Phe or Cys
  misc_feature (259)..(259): Absent or Thr or Ile or Asp or Glu or Gly or Arg or Ser or Val
  misc_feature (260)..(260): Absent or Glu or Lys or Thr or Asn or Ser or Gly
  misc_feature (261)..(261): Absent or Phe or Arg or Lys or Ser or Glu or Gly or Asn or Asp
  misc_feature (262)..(262): Absent or Ser or Lys or Asn or Ile or Ala or Gln or Pro or Thr or Gly
  misc_feature (263)..(263): Absent or Tyr or Pro or Leu or Val or Ile or Ser or Gly or Arg or Gln or Glu or Phe or Thr or Ala
  misc_feature (264)..(264): Absent or Ser or Glu or Lys or Asp or Arg or Ile or Tyr or Ala
  misc_feature (265)..(265): Absent or Gly or Ala or Val or Asp or Glu or Gln or His or Arg or Asn or Ile or Ser
  misc_feature (266)..(266): Absent or Gly or Glu or Lys or Ser or Ile or Leu or Gln or Thr or Val or Ala
  misc_feature (267)..(267): Absent or Ser or Leu or Pro or Val or Lys or Glu or Asp or X or Gln or Cys or Met
  misc_feature (268)..(268): Absent or Asp or Val or Gln or His or Ile or Gly or Ala or Pro or Met
  misc_feature (269)..(269): Absent or Ala or Lys or Glu or Gly or Ser or Asn or Val or Asp or Thr or Leu or Pro
  misc_feature (270)..(270): Absent or Cys or Ser or Ile or Asn or Phe or Thr or Lys or Gly or Asp or Pro or Ala
  misc_feature (271)..(271): Absent or Gln or Ser or Arg or Glu or Gly or Lys or Asn or Ala or Thr or Pro
  misc_feature (272)..(272): Absent or Val or Ser or Gly or Lys or Met or Arg or Phe or Asp or Gln or Glu or His or Ala
  misc_feature (273)..(273): Met or Absent or Gly or Ile or Ala or Val or Arg or Cys or Ser or Leu
  misc_feature (274)..(274): Gly or Absent or Lys or Asn or Glu or Val or Leu or Ile or Gln or Pro or Tyr or Asp or Phe
  misc_feature (275)..(275): Trp or Absent or Asn or Phe or Ser or Leu or Ile or Arg or His or Asp or Gly or Tyr or Val
  misc_feature (276)..(276): Gly or Absent or Arg or Ser or Lys or Asn or Leu or Val or Glu
  misc_feature (277)..(277): Ala or Absent or Ile or Gln or Thr or Asp or Ser or Glu or Leu or Asn
  misc_feature (278)..(278): Arg or Absent or Val or Asp or Glu or Leu or His or Gly or Ser or Met or Ala or Lys
  misc_feature (279)..(279): Gly or Absent or Ile or Val or Leu or Pro or Thr or Ala or Lys or Asn
  misc_feature (280)..(280): Gly or Absent or Lys or Val or Asp or Asn or Glu
  misc_feature (281)..(281): Asp or Absent or Ser or Pro or Lys or Met or Ile or Thr or Ala or Arg
  misc_feature (282)..(282): Asp or Absent or Leu or Gly or Cys or Phe or Lys or Ser or Glu or Tyr
  misc_feature (283)..(283): Ala or Absent or Ile or Gly or Ser or Asn or Arg or His or Val
  misc_feature (284)..(284): Arg or Gly or His or Absent or Asp or Ser or Leu or Phe or Met or Val or Ala or Glu
  misc_feature (285)..(285): Ala or Asp or Glu or Absent or Gly or Lys or Arg or Leu or Asn
  misc_feature (286)..(286): Val or Phe or Thr or Absent or Asp or Asn or Gly
  misc_feature (287)..(287): Cys or Glu or Lys or Absent or Ala or Leu or Pro or Gly or Thr or Ser or Gln
  misc_feature (288)..(288): Ala or Gly or Glu or Absent or Val or Met or Leu or Thr or Ile or Ser
  misc_feature (289)..(289): Val or Asn or Thr or Absent or Asp or Glu or Lys or Ala or Gln or Leu
  misc_feature (290)..(290): Ala or Ser or Lys or Absent or Leu or Arg or Trp or Phe or Glu or Gly or Val
  misc_feature (291)..(291): Ala or Glu or Asp or Absent or Gln or Tyr or Cys or His or Gly or Val
  misc_feature (292)..(292): Phe or Asp or Absent or Ala or Arg or Gly or Ile or Glu or Val or Thr or Met or Leu or Ser
  misc_feature (293)..(293): Gly or Ile or Asn or Absent or Arg or Ala or Lys or Gln
  misc_feature (294)..(294): Val or Asp or Absent or Pro or Ser or Thr or Leu or Asn or Arg or Phe
  misc_feature (295)..(295): Ala or Pro or Val or Absent or Asn or Ile or Leu or Ser or His or Glu or Thr
  misc_feature (296)..(296): Pro or Lys or Val or Absent or Gly or Ala or Arg or His or Ser or Asn or Glu
  misc_feature (297)..(297): Val or Gly or Asn or Absent or His or Pro or Leu or Ile or Met or Ala or Gln or Ser
  misc_feature (298)..(298): Pro or Phe or Asn or Absent or Val or Ala or Lys or Ile or Leu or Asp
  misc_feature (299)..(299): Ser or Phe or Absent or His or Thr or Val or Ile or Asn or Cys or Leu
  misc_feature (300)..(300): Ala or Asn or Leu or Absent or Val or Ser or Gly
  misc_feature (301)..(301): Arg or Asp or Glu or Absent or Gly or Asn or Lys or Ser or Ala
  misc_feature (302)..(302): Pro or Cys or Thr or Absent or Ser or Asn or Ala or Gly or Asp or Glu or Lys
  misc_feature (303)..(303): Val or Lys or Met or Absent or Asn or Ser or Gly or Asp or Ile or Thr
  misc_feature (304)..(304): Gly or Arg or Glu or Absent or Asn or Ser or Ile or Asp
  misc_feature (305)..(305): Val or Leu or Absent or Ala or Lys or Ser or Glu
  misc_feature (306)..(306): Ala or Met or Glu or Absent or Ser or Lys or Gln or Asn or His or Asp
  misc_feature (307)..(307): Pro or Leu or Val or Absent or Ser or Ala or Glu or Thr or Ile
  misc_feature (308)..(308): Pro or Asp or Lys or Absent or Arg or Ser or Gly or Ala or Leu
  misc_feature (309)..(309): Val or Thr or Pro or Absent or Leu or Ala or Gly or Ser or Tyr or His
  misc_feature (310)..(310): Arg or Glu or Gln or Absent or Phe or Cys or Gly or Tyr or Asn or Thr
  misc_feature (311)..(311): Thr or Ala or Pro or Absent or Val or Lys or Ser or Glu or Gly or Arg or Ile or Asn or Phe or Leu or Cys or Asp
  misc_feature (312)..(312): Thr or Ser or Gly or Absent or Pro or Asp or Glu or Asn or Arg or Ala or Lys
  misc_feature (313)..(313): Thr or His or Leu or Absent or Ser or Cys or Asn or Arg or Lys or Gln or Pro or Met or Ala or Ile or Val
  misc_feature (314)..(314): Lys or Leu or Glu or Absent or Ile or Met or Val or Pro or Thr or Cys or His or Arg
  misc_feature (315)..(315): Ser or Val or Asn or Absent or Gly or Pro or Ile or Lys or Arg
  misc_feature (316)..(316): Leu or Glu or Absent or Asn or Cys or Arg or His or Pro or Asp or Ser
  misc_feature (317)..(317): Ser or Ile or Absent or Cys or Gly or Gln or Ala or Val or Asp or Thr
  misc_feature (318)..(318): Ala or Pro or Gln or Absent or Val or Ser or Leu or Asn
  misc_feature (319)..(319): Ser or Ile or Val or Absent or Phe or Tyr or Leu or Pro
  misc_feature (320)..(320): Asp or Pro or Leu or Absent or His or Ser or Val or Ala or Lys or Asn
  misc_feature (321)..(321): Gly or Thr or Leu or Absent or Arg or Ala or Lys or Glu
  misc_feature (322)..(322): Absent or Asn or Gly or Val
  misc_feature (323)..(323): Absent or Pro or Ser
  misc_feature (324)..(324): Absent or Lys
  misc_feature (325)..(325): Absent or Gly
  misc_feature (326)..(326): Absent or Gly or Val
  misc_feature (327)..(327): Ser or Cys or Absent or Val or Pro or Asn or His or Gln or Tyr or Ala or Gly
  misc_feature (328)..(328): His or Gln or Lys or Absent or Arg or Cys or Trp or Ser or Gly or Glu or Phe
  misc_feature (329)..(329): Asn or Leu or Asp or Absent or Ala or Glu or Gly or Ser or Thr or Tyr or Phe
  misc_feature (330)..(330): Thr or Asn or Trp or Absent or Asp or Ser or His or Ala or Pro
  misc_feature (331)..(331): Thr or Leu or Absent or Val or Met or Ser
  misc_feature (332)..(332): His or Asn or Ala or Absent or Glu or Lys or Pro or Asp or Ser
  misc_feature (333)..(333): Leu or Ile or Absent or Val or Phe or Arg
  misc_feature (334)..(334): Asp or His or Gly or Absent or Phe or Val or Glu
  misc_feature (335)..(335): Gly or Cys or Pro or Absent or Ser or Asp or Asn or Ile or Val or Arg or Glu
  misc_feature (336)..(336): Asp or Gln or Ser or Absent or Arg or Gly or Lys or Ile
  misc_feature (337)..(337): Gly or Glu or Met or Absent or Asp or Asn
  misc_feature (338)..(338): Glu or Asp or Pro or Absent or Asn
  misc_feature (339)..(339): Asp or Met or Asn or Absent
  misc_feature (340)..(340): Ala or Phe or Ser or Absent or Glu or Gly or Asp
  misc_feature (341)..(341): Pro or Met or Absent or Asn or Lys or Ser or Glu
  misc_feature (342)..(342): Ala or Lys or Ile or Absent or Phe or Ser or Tyr or Leu or Asn
  misc_feature (343)..(343): Ile or His or Thr or Absent or Ser or Tyr or Phe or Cys
  misc_feature (344)..(344): Glu or Asp or Gln or Absent or Lys or Gly or Arg or Ser
  misc_feature (345)..(345): Asp or Cys or Glu or Absent or Tyr or Ser or Gly
  misc_feature (346)..(346): Cys or Ser or Glu or Absent or Ile or Thr or Asn or Tyr or Arg or His
  misc_feature (347)..(347): Ala or Gln or Absent or Asn
  misc_feature (348)..(348): Ser or Ala or Absent or His or Gln or Phe or Tyr
  misc_feature (349)..(349): Thr or Absent or His or Gln or Pro or Ser or Val or Lys or Arg
  misc_feature (350)..(350): Glu or Val or Absent or Pro or Tyr or Ser or Ile or Ala or Leu or Phe or His or Cys
  misc_feature (351)..(351): Arg or Glu or Absent or Gly or Asn or Cys or Ser or Thr
  misc_feature (352)..(352): Leu or Glu or Absent or Val or Ala or Thr or Ile or Tyr or Asn
  misc_feature (353)..(353): Thr or Asn or Absent or Met or Ile or Ser or Lys or Glu or Arg
  misc_feature (354)..(354): Gln or Absent or Lys or Pro or Met or Thr or Phe or Leu or Ile or Val or Asn
  misc_feature (355)..(355): Arg or Absent or His or Lys or Thr or Phe
  misc_feature (356)..(356): Gln or Absent or Asn or Ser or Thr or Leu or Phe or Ala or Met or Gly or Asp
  misc_feature (357)..(357): Asp or Absent or Phe or Pro or Ser or Tyr or Leu or Thr
  misc_feature (358)..(358): Ala or Absent or Asp or Arg or Thr or Lys
  misc_feature (359)..(359): His or Absent or Ser or Thr or Pro or Leu or Cys
  misc_feature (360)..(360): Phe or Absent or Arg or Val or Leu or Thr or Ala or Lys or Gln or Ser or Pro or Asn
  misc_feature (361)..(361): Ser or Absent or Pro or Arg or Thr or Leu or Ala or Cys
  misc_feature (362)..(362): Gly or Absent or Lys or Arg or Tyr or His or Cys or Thr
  misc_feature (363)..(363): Arg or Absent or Ile or Thr or Leu or Met or Asn or Ala
  misc_feature (364)..(364): Ala or Absent or Asp or Gly or Glu or Asn or Val or Thr or Pro
  misc_feature (365)..(365): Gly or Absent or Ser or Asp or Thr or Asn or Tyr or His or Ile or Leu or Gln
  misc_feature (366)..(366): His or Absent or Lys or Arg or Gln or Asn or Ser
  misc_feature (367)..(367): Gly or Absent or Arg
  misc_feature (368)..(368): Leu or Absent or Ile or Met or Val
  misc_feature (369)..(369): Ala or Absent or Arg or Ser or Gly or Lys
  misc_feature (370)..(370): Val or Absent or Lys or Asn
  misc_feature (371)..(371): Met or Absent or Ile or Leu or Val or Arg or Ser or Phe
  misc_feature (372)..(372): Ile or Absent or Leu or Thr or Ser or Met or Trp or Gln or Arg
  misc_feature (373)..(373): Pro or Absent or Ala or Thr or Lys or Ser or Ile
  misc_feature (374)..(374): Gln or Absent or Ser or Ala or Met or Cys
  misc_feature (375)..(375): Thr or Absent or Arg or Lys or Asn or Gln
  misc_feature (376)..(376): Ser or Absent or His or Cys or Tyr or Phe or Arg
  misc_feature (377)..(377): Phe or Absent or Trp or Gln or Cys or Ser or Val or Arg
  misc_feature (378)..(378): Asp or Absent or Lys or Arg or Gly
  misc_feature (379)..(379): Gln or Absent or Gly or Ala or Val
  misc_feature (380)..(380): Val or Absent or Gly or Ala or Thr or Pro or Tyr or Ile
  misc_feature (381)..(381): Pro or Absent or Ser or Glu
  misc_feature (382)..(382): Leu or Absent or Arg or Ile or Asn or Lys or Ala
  misc_feature (383)..(383): Ala or Absent or His or Ser or Leu or Met or Thr or Asn or Arg
  misc_feature (384)..(384): Leu or Absent or Ser or Lys or Arg or Asn or Met or Ile or Val
  misc_feature (385)..(385): Arg or Absent or Asp or Ser or Glu or Asn or Cys or Thr or His or Tyr
  misc_feature (386)..(386): Asn or Absent or Thr or Gly or Val or Ala or Asp or His or Tyr or Cys or Phe or Lys
  misc_feature (387)..(387): Ala or Absent or Lys or Gly or Thr or Glu or Val or Ser
  misc_feature (388)..(388): Arg or Absent or Pro or Tyr or Phe or Leu or Val or His or Asp or Lys
  misc_feature (389)..(389): Leu or Absent or Trp or Phe or Ser or Thr or Tyr or Glu or Pro
  misc_feature (390)..(390): Asp or Absent or Arg or Asn or Tyr or Cys or Trp or Ser
  misc_feature (391)..(391): Ala or Absent or Asn or Thr or Ser or Val or Ile or Leu or Tyr
  misc_feature (392)..(392): Absent or Gly or Ser
  misc_feature (393)..(393): Absent or Glu or Gly
  misc_feature (394)..(394): Absent or His or Glu
  misc_feature (395)..(395): Absent or Tyr or His
  misc_feature (396)..(396): Absent or Gly or Cys
  misc_feature (397)..(397): Absent or Pro or Glu
  misc_feature (398)..(398): Absent or Phe or Ile
  misc_feature (399)..(399): Absent or Val or Pro
  misc_feature (400)..(400): Absent or Ser or Phe
  misc_feature (401)..(401): Absent or Lys or Thr
  misc_feature (402)..(402): Absent or Ser or Phe
  misc_feature (403)..(403): Absent or Tyr or Ser
  misc_feature (404)..(404): Absent or Val or Phe
  misc_feature (405)..(405): Absent or Leu or Phe
  misc_feature (406)..(406): Absent or Phe or Glu
  misc_feature (407)..(407): Absent or Lys or Glu
  misc_feature (408)..(408): Absent or Met or His
  misc_feature (409)..(409): Absent or Leu or Cys
  misc_feature (410)..(410): Absent or Trp or Ile
  misc_feature (411)..(411): Absent or Phe or Asp
  misc_feature (412)..(412): Absent or Ile or Gly
  misc_feature (413)..(413): Absent or Tyr or Thr
  misc_feature (414)..(414): Absent or Val or His
  misc_feature (415)..(415): Absent or Ser or Ile
  misc_feature (416)..(416): Absent or Leu or Gln
  misc_feature (417)..(417): Absent or Ser or Thr
  misc_feature (418)..(418): Absent or Glu or Cys
  misc_feature (419)..(419): Absent or Asn or Leu
  misc_feature (420)..(420): Absent or Val or Leu
  misc_feature (421)..(421): Absent or Leu or Tyr
  misc_feature (422)..(422): Absent or Ser
  misc_feature (423)..(423): Absent or Tyr
  misc_feature (424)..(424): Absent or Leu
  misc_feature (425)..(425): Absent or Ser
  misc_feature (426)..(426): Absent or Ser
  misc_feature (427)..(427): Absent or Leu
  misc_feature (428)..(428): Absent or Ile
  misc_feature (429)..(429): Absent or Leu
  misc_feature (430)..(430): Absent or Leu
  misc_feature (431)..(431): Absent or Val or Asp or Asn or Gly or Ser
  misc_feature (432)..(432): Absent or Ala or Trp or Arg or Val or Gly or Leu or Glu
  misc_feature (433)..(433): Absent or Pro or Lys or Asp or Glu or Gly or Ala or Arg
  misc_feature (434)..(434): Absent or Thr or Arg or Phe or Ser or Leu or Val or Trp or Ala or Met or Ile
  misc_feature (435)..(435): Absent or Lys or Arg or Glu
  misc_feature (436)..(436): Absent or Gln or Val or Pro or Arg or Ser or Ala or Thr
  misc_feature (437)..(437): Absent or Ala or Ser or Pro or Val or Phe or Ile or Thr or Asp or Cys or Leu
  misc_feature (438)..(438): Absent or Phe or His or Tyr
  misc_feature (439)..(439): Absent or Phe or Leu or Arg or Trp or His or Cys or Tyr or Val
  misc_feature (440)..(440): Absent or Asn or Lys or Thr or Ser or Gln or Cys or Tyr
  misc_feature (441)..(441): Leu or Gly or Glu or Absent or Trp or Arg or Lys or Ser
  misc_feature (442)..(442): Ala or Ile or Arg or Absent or Lys or Gln
  misc_feature (443)..(443): Ile or Ala or Gly or Absent or Thr or Asn or His or Ser or Phe or Leu or Arg or Met
  misc_feature (444)..(444): Pro or Thr or Ser or Absent or Cys or Tyr or Val or Ile or Gly or His
  misc_feature (445)..(445): Asp or Cys or Absent or Tyr or Asn or Leu or His or Arg or Gly
  misc_feature (446)..(446): Arg or Thr or Ile or Absent or Tyr or Ser or Pro or Lys or Ala or Val or Asn or Gly
  misc_feature (447)..(447): Ser or Arg or Absent or Tyr or Cys or His or Glu or Leu
  misc_feature (448)..(448): Gln or Absent or Leu or Arg or Glu or Asp or Lys or Gly or Asn or His
  misc_feature (449)..(449): Thr or Arg or Glu or Absent or His or Ser or Ala or Pro
  misc_feature (450)..(450): Pro or Thr or Ser or Absent or Gln or Tyr or Cys or Trp or His
  misc_feature (451)..(451): Gly or Ser or Gln or Absent or Asp or Glu or Leu or Lys
  misc_feature (452)..(452): Val or Arg or Asn or Absent or Lys or Met or Tyr or Leu or Pro or His
  misc_feature (453)..(453): Lys or Arg or Met or Absent or Ser or Ile or Asn or Leu or Asp or Glu
  misc_feature (454)..(454): Ser or Ile or Tyr or Absent or Phe or Val or Thr
  misc_feature (455)..(455): Pro or Absent or Gln or Thr or Phe or Ile
  misc_feature (456)..(456): Phe or Leu or Absent or Ile or Thr or Ser or Tyr or His
  misc_feature (458)..(458): Ala or Arg or Lys or Absent
  misc_feature (460)..(460): Asn or Gln or Lys or Absent or Arg
  misc_feature (461)..(461): Val or Phe or Leu or Absent or Asn or His or Tyr or Ser or Met
  misc_feature (462)..(462): Leu or Glu or Phe or Absent or Cys or Ser or Pro
  misc_feature (463)..(463): Leu or Asp or Tyr or Absent or Gly or Ala or Asn or Glu
  misc_feature (464)..(464): Asn or Gly or Gln or Absent or His or Cys or Tyr or Arg or Lys or Ser
  misc_feature (465)..(465): Met or Asn or Absent or Ile or Ser or Gly or Arg or Tyr or His or Val
  misc_feature (466)..(466): Met or Lys or His or Absent or Ser or Thr or Pro or Phe or Leu or Tyr
  misc_feature (467)..(467): Ala or Cys or Ser or Absent or Asp or Leu or Glu or Val or Gln or Pro or Thr
  misc_feature (468)..(468): Cys or Ser or Absent or Pro or Ala or Val or Phe or Leu or Gln
  misc_feature (469)..(469): Gly or Leu or Glu or Absent or Val or Thr or Asn or Gln or Arg or Ala
  misc_feature (470)..(470): Ser or Glu or Absent or Thr or Phe or Tyr
  misc_feature (471)..(471): Asp or Pro or His or Absent or Glu or Asn or Tyr
  misc_feature (472)..(472): Glu or Gln or Asp or Absent or Gly or Arg or Phe
  misc_feature (473)..(473): Glu or Met or Thr or Absent or Tyr or Ala or Gly or Leu or Phe
  misc_feature (474)..(474): Asn or Pro or Absent or Arg or Phe or Leu or Ile or Met or Ala or Thr
  misc_feature (475)..(475): Glu or Thr or Cys or Absent or Met or His or Arg or Ser or Gly or Lys or Leu or Ala
  misc_feature (476)..(476): Ala or Asn or Thr or Absent or Arg or Gln or Ser or His
  misc_feature (477)..(477): Pro or Tyr or Absent or Lys or Gly or Asn
  misc_feature (478)..(478): Gly or Pro or Absent or Leu or Lys or Ala
  misc_feature (479)..(479): Thr or Ile or Absent or Cys or Leu or Ser or Arg or Asn or Lys or Gly
  misc_feature (480)..(480): Arg or Asn or Absent or Thr or Glu or Asp or Gln or Gly or His or Ser
  misc_feature (481)..(481): Gly or Val or Absent or Lys or Asp or Gln or Cys or Phe or Arg or Ser or Thr
  misc_feature (482)..(482): Asn or Glu or Absent or Met or Ile or Val or Gln or Gly or Thr or Lys
  misc_feature (483)..(483): Lys or Tyr or Absent or His or Phe or Pro or Ser or Thr or Cys
  misc_feature (484)..(484): Arg or Asn or Absent or Glu or Asp or Tyr or Gly or Lys or Val or Phe
  misc_feature (485)..(485): Asp or Ala or Absent or Gly or Ser or Cys or Leu or Thr or Asn
  misc_feature (486)..(486): Ser or Val or Absent or Thr or Pro or Ile or Ala or Gly
  misc_feature (487)..(487): Leu or Tyr or Absent or Arg or Asn or Ser or Glu or Lys or Gln or Asp
  misc_feature (488)..(488): His or Gly or Absent or Lys or Asp or Met or Asn or Ser or Glu
  misc_feature (489)..(489): Pro or Glu or Absent or Gly or Arg or Cys or Ala or Asn or Met or Ser
  misc_feature (490)..(490): Leu or Pro or Absent or Gln or Thr or Gly or Ile or Ser or Met or Val or Lys or Asp or Glu or His or Asn
  misc_feature (491)..(491): Ser or Pro or Absent or Gly or Asn or Leu or Ile or Lys or Asp or His or Thr or Ala
  misc_feature (492)..(492): Val or Ala or Absent or Gly or Arg or Glu or Ser or Gln or Thr or Lys or Met or Asp
  misc_feature (493)..(493): Pro or Ala or Absent or Ser or Asn or Arg or Asp or Glu or His or Leu
  misc_feature (494)..(494): Cys or Ala or Absent or Phe or Asp or Lys or Gly or Asn or Ile or Thr or Met or Tyr or Ser or Leu
  misc_feature (495)..(495): Pro or Ala or Absent or Val or Met or Leu or Phe or Ser or Cys or Thr or Asn or Gly or Asp or Glu
  misc_feature (496)..(496): Lys or Absent or Ala or Val or His or Gly or Asp or Ser or Thr or Asn or Phe
  misc_feature (497)..(497): Lys or Leu or Absent or Ser or Asn or Ala or Thr or Arg or Val
  misc_feature (498)..(498): Arg or Absent or Gly or Gln or His or Ser or Cys or Pro or Phe or Asp or Ala or Lys
  misc_feature (499)..(499): Arg or Absent or Ala or Asn or Pro or Ser or Leu or Val or Gly
  misc_feature (500)..(500): Thr or Absent or Lys or Leu or Arg or Gly or Ser or Ile or Met
  misc_feature (501)..(501): Ser or Absent or Leu or Glu or Thr or Met or Trp or Asn or Pro or Phe or Ile
  misc_feature (502)..(502): Lys or Absent or Ser or His or Arg or Ile or Pro or Gly
  misc_feature (503)..(503): Ser or Absent or Ala or Gly or Lys or Arg or X or Met or Thr
  misc_feature (504)..(504): Absent or Thr or Phe or Ala or Glu or Gly or Asp or Cys or Val or Pro
  misc_feature (505)..(505): Absent or Glu or Asp or Thr or Phe or Ile or Pro or Gln or Ser or Asn
  misc_feature (506)..(506): Absent or Ala or Arg or Phe or Ser or Gly or Lys or His or Gln
  misc_feature (507)..(507): Absent or Ser or Gly or Ala or Thr or Met or Gln or Val or Asp or Leu or Lys
  misc_feature (508)..(508): Absent or Ser or Phe or Pro
  misc_feature (509)..(509): Absent or Ser or Ala or Gln or Val or Cys or Arg
  misc_feature (510)..(510): Absent or Val or Cys or Ser or Leu or Ala or Thr or Lys or Glu or Gly
  misc_feature (511)..(511): Absent or Lys or Ala or Ile or Val or Glu or Phe or Gly or Thr or Ser
  misc_feature (512)..(512): Absent or Gly or Ala or Gln or Thr or Ile or Leu or Asn or Ser
  misc_feature (513)..(513): Absent or Gln or Met or Gly or Cys or Ser or Leu or Ile
  misc_feature (514)..(514): Absent or His or Tyr or Gln or Arg or Pro or Val or Trp or Met
  misc_feature (515)..(515): Absent or Ala or Asn or Gly or Arg or His or Lys or Gln or Phe or Trp
  misc_feature (516)..(516): Absent or Ser or Asn or Cys or Thr or Gln or Asp or Val or Ala or Phe
  misc_feature (517)..(517): Absent or Leu or His or Phe or Ser or Met or Thr or Ile
  misc_feature (518)..(518): Absent or Asp or Asn or His or Phe or Glu or Leu or Met or Gln or Ile or Cys
  misc_feature (519)..(519): Absent or Lys or Gln or Phe or Ile or Met or Arg or His or Asn or Leu
  misc_feature (520)..(520): Absent or Gly or Ser or Ala or X or Phe
  misc_feature (521)..(521): Absent or Lys or Arg or Phe or Ile or Gly or Met or Val
  misc_feature (522)..(522): Absent or Lys
  misc_feature (523)..(523): Absent or Ser
  misc_feature (524)..(524): Absent or Glu
  misc_feature (525)..(525): Absent or Asn
  misc_feature (526)..(526): Absent or Asp or Ser or Phe or Gly or Leu
  misc_feature (527)..(527): Leu or Absent or Ser or Arg or Tyr or Asn or Pro or His or Gly or Cys
  misc_feature (528)..(528): Arg or Absent or His or Asp or Ala or Ser or Glu or Pro or Asn or Lys or Gly or Tyr
  misc_feature (531)..(531): Ser or Phe or Absent or Leu or Asn
  misc_feature (532)..(532): Asn or Gly or Absent or Arg or Ser or Lys
  misc_feature (536)..(536): Leu or Phe or Absent or Glu
  misc_feature (537)..(537): Asn or Thr or Absent or Arg or Phe or Lys or Ser or Glu
  misc_feature (538)..(538): Val or Ile or Absent or Phe
  misc_feature (542)..(542): Pro or Phe or Leu or Absent or Tyr or Val
  misc_feature (543)..(543): Glu or Val or Absent or Ile or Leu
  misc_feature (545)..(545): Ala or Leu or Val or Absent or Ile or Pro
  misc_feature (547)..(547): Glu or Absent or Ile or Ala or Asp
  misc_feature (548)..(548): Ala or Ser or Absent or Thr or Lys or His
  misc_feature (551)..(551): Ser or Ile or Val or Absent or Cys
  misc_feature (553)..(553): Lys or Thr or Ser or Absent or Leu or Ala or Gly or Pro
  misc_feature (556)..(556): Absent or Glu or Val
  misc_feature (557)..(557): Absent or Gly or His
  misc_feature (558)..(558): Absent or Gly or Cys
  misc_feature (559)..(559): Absent or Gly or Asn
  misc_feature (560)..(560): Absent or Val
  misc_feature (561)..(561): Absent or His
  misc_feature (562)..(562): Absent or Leu
  misc_feature (563)..(563): Absent or Leu
  misc_feature (564)..(564): Absent or Ser
  misc_feature (565)..(565): Absent or Phe
  misc_feature (566)..(566): Absent or Ser
  misc_feature (567)..(567): Absent or Gly
  misc_feature (568)..(568): Absent or Thr
  misc_feature (569)..(569): Absent or Cys
  misc_feature (570)..(570): Absent or Leu
  misc_feature (571)..(571): Absent or Ala
  misc_feature (572)..(572): Absent or Leu
  misc_feature (573)..(573): Absent or Leu
  misc_feature (574)..(574): Absent or Cys
  misc_feature (575)..(575): Absent or Val
  misc_feature (576)..(576): Absent or Asp
  misc_feature (577)..(577): Absent or Ile
  misc_feature (578)..(578): Absent or Lys
  misc_feature (579)..(579): Absent or Val
  misc_feature (580)..(580): Absent or Leu
  misc_feature (581)..(581): Absent or Ile
  misc_feature (582)..(582): Absent or Val
  misc_feature (583)..(583): Absent or Ile
  misc_feature (584)..(584): Absent or Phe
  misc_feature (585)..(585): Absent or Trp or X
  misc_feature (586)..(586): Absent or Met or Leu
  misc_feature (587)..(587): Absent or Trp or Phe
  misc_feature (588)..(588): Absent or Gly or Trp
  misc_feature (589)..(589): Absent or Lys or Leu
  misc_feature (590)..(590): Absent or Gln
  misc_feature (591)..(591): Absent or Glu or Leu or Arg or Lys
  misc_feature (592)..(592): Absent or Ala or Met or Thr
  misc_feature (594)..(594): His or Met or Leu or Absent or Val or Lys
  misc_feature (598)..(598): Ser or Met or Thr or Absent or Ile or Pro or Asn
  misc_feature (599)..(599): Leu or Arg or Gln or Absent or Thr or Ser or Ala or Pro or Val
  misc_feature (600)..(600): Pro or Leu or Ile or Absent or Val or Met
  misc_feature (602)..(602): Val or Glu or Lys or Absent or Ser or Gly
  misc_feature (603)..(603): Glu or Gly or Absent or Asp or Ser
  misc_feature (605)..(605): Leu or Absent or His or Ile or X
  misc_feature (606)..(606): Val or Arg or Asn or Absent or His
  misc_feature (607)..(607): Arg or Val or Ile or Absent
  misc_feature (609)..(609): Val or Absent or Leu or Ile or Met or Ser
  misc_feature (610)..(610): Ala or Leu or Absent or Met or Phe or Ile or Val
  misc_feature (611)..(611): His or Met or Phe or Absent or Val or Leu or Ile
  misc_feature (612)..(612): Tyr or His or Gln or Absent or Arg or Trp or Lys
  misc_feature (620)..(620): Ile or Gly or Ser or Absent or Asn or Tyr or Asp or Lys or Arg
  misc_feature (621)..(621): Lys or Ala or Absent or Arg or Asn
  misc_feature (624)..(624): Arg or Leu or Absent or His or Met or Gln or Glu or Ser or Ile
  misc_feature (626)..(626): Absent or Ser or Gly
  misc_feature (627)..(627): Asp or Gly or Ile or Absent or Thr or Ser or Ala or Leu
  misc_feature (630)..(630): Ser or Pro or Absent or Ala or Leu or Thr or Gly
  misc_feature (631)..(631): Glu or Ser or Tyr or Absent or Gln or His or Arg or Leu or Cys or Phe
  misc_feature (632)..(632): Thr or Ser or Asp or Absent or Gly or Asn or Gln or His or Lys or Glu or Arg
  misc_feature (633)..(633): Leu or Ser or Asp or Absent or Asn or Thr or Glu or Gly
  misc_feature (634)..(634): Ile or Ser or Asp or Absent or Asn
  misc_feature (635)..(635): Asn or Absent or Asp
  misc_feature (636)..(636): Absent or Asp
  misc_feature (637)..(637): Absent or Glu
  misc_feature (638)..(638): Absent or Thr or Asn or His or Lys or Gln or Glu or Leu or Asp or Ile or Val or Met
  misc_feature (641)..(641): Absent or Pro or X
  misc_feature (642)..(642): Arg or His or Ser or Absent or Asn or Thr or Ala
  misc_feature (646)..(646): Asp or Absent or Met or Ser or Cys or Thr or Ala
  misc_feature (650)..(650): Lys or Absent or Gln or Ser or Arg or Asn or Thr or Ile or Gly
  misc_feature (651)..(651): Trp or Absent or Lys or Ser or His or Cys or Pro or Phe or Leu or Gly
  misc_feature (652)..(652): Arg or Absent or Ser or Glu or Ala or Thr or Pro or Val or Ile or Gly
  misc_feature (653)..(653): Absent or Gln or Arg or Ser or Pro
  misc_feature (654)..(654): Absent or Lys or Gln or Ala or Thr or Ile or Asn or Ser or Glu or His
  misc_feature (655)..(655): Absent or Met or Ile or Ser or Pro or Arg or Leu or Thr or Ala or Val or Gly
  misc_feature (656)..(656): Absent or Met or Pro or Lys or His or Gln or Ser or Thr or Ala or Cys or Leu
  misc_feature (657)..(657): Absent or Ser or Pro or Ala or Ile or X or Glu or Leu or Val or Gln
  misc_feature (658)..(658): Absent or Pro or Ser or Leu or Ala or Val
  misc_feature (659)..(659): Absent or Pro or Leu or Cys or Ser or Ile or Val or Ala or Gln
  misc_feature (660)..(660): Absent or His or Cys or Pro or Ala or Ser or Val
  misc_feature (661)..(661): Absent or Thr or Ala or Glu or Gly or Ser or Gln or Pro
  misc_feature (662)..(662): Absent or Lys or Glu or Ser or Asp or Thr or His or Asn
  misc_feature (663)..(663): Absent or Asn or Asp or Ser or Gly or Lys or Thr
  misc_feature (664)..(664): Absent or Pro or Ser or Asp or Leu or Arg or Val or His or Ile or Asn
  misc_feature (665)..(665): Asn or Absent or Ser or Ala or Phe or Leu or Gly or Arg or Pro or Val or Glu
  misc_feature (666)..(666): Leu or Absent or Asn or Val or His or Cys or Ala or Phe or Pro
  misc_feature (667)..(667): Leu or Absent or Phe or Ile or Val or Ala or Lys or Ser or Pro or Met
  misc_feature (668)..(668): Arg or Absent or Pro or Leu or Ser or Thr or Glu
  misc_feature (669)..(669): Val or Absent or Phe or His or Pro or Ser or Gln or Gly or Lys or Thr or Ala or Asn
  misc_feature (670)..(670): Ala or Absent or Gly or Cys or Tyr or Ser or Asn or Thr or Val or Ile
  misc_feature (671)..(671): Val or Absent or Glu or Ser or Cys or Gly or Asp or Asn or Thr
  misc_feature (672)..(672): Leu or Absent or Thr or Met or Ala or Val or Ile or Pro or Ser
  misc_feature (673)..(673): Pro or Absent or Thr or His or Asn or Asp or Ser or Ala
  misc_feature (674)..(674): Ala or Absent or Thr or Gln or Gly or Asp or Glu or His or Leu or Ser or Asn or Lys
  misc_feature (675)..(675): Leu or Absent or Ile or Gly or His or Pro or Thr or Glu or Asn or Asp
  misc_feature (676)..(676): Tyr or Absent or Thr or Leu or Ile or Val or Ser
  misc_feature (677)..(677): Lys or Absent or Thr or Ser or Leu or Ile or Cys or Glu or Ala
  misc_feature (678)..(678): Arg or Absent or Leu or Phe or Ser or Gly
  misc_feature (679)..(679): Arg or Absent or Thr or His or Tyr or Phe or Cys or Ser or Leu or Ile
  misc_feature (680)..(680): Glu or Absent or Thr or Pro or Ser or Val or Arg or Ala or Tyr
  misc_feature (681)..(681): Ile or Absent or Val or Leu or Thr or Pro or His or Ser or Ala or Asp
  misc_feature (682)..(682): Asn or Absent or Ser or Gly or Ile or Thr or Ala or Asp or Pro
  misc_feature (683)..(683): Gly or Absent or Pro or His or Leu or Thr or Ala or Arg or Gln or Asp
  misc_feature (684)..(684): Absent or Met or Thr or Arg
  misc_feature (685)..(685): Absent or Leu or Ser
  misc_feature (686)..(686): Absent or Gln or Gly or Met
  misc_feature (687)..(687): Absent or Tyr
  misc_feature (688)..(688): Absent or Ala
  misc_feature (689)..(689): Absent or Ala
  misc_feature (690)..(690): Absent or Ser
  misc_feature (691)..(691): Absent or Phe
  misc_feature (692)..(692): Absent or Phe
  misc_feature (693)..(693): Absent or Ser
  misc_feature (694)..(694): Absent or Val
  misc_feature (695)..(695): Absent or Glu
  misc_feature (696)..(696): Absent or Lys
  misc_feature (697)..(697): Absent or Asn
  misc_feature (698)..(698): Absent or Ser
  misc_feature (699)..(699): Absent or Val
  misc_feature (700)..(700): Absent or Ser
  misc_feature (701)..(701): Absent or Gly or Ser or Thr or Ala or Asp or Ile or Val or Met or Glu
  misc_feature (702)..(702): Absent or Met or Leu or Val or Ser or Ile or Phe
  misc_feature (703)..(703): Absent or Ile or Val or Ala or Phe or Asp or Gly or Glu or Asn or Ser
  misc_feature (704)..(704): Absent or Gln or His or Cys or Ser or Phe or Leu or Thr
  misc_feature (705)..(705): Absent or Gln or Asn or Gly or Asp or Glu or Arg or Ser
  misc_feature (706)..(706): Absent or Ala or Arg or Phe or Leu or Ile or Val or Asn or Thr or Lys
  misc_feature (707)..(707): Absent or Cys or Ile or Phe or Ser or His or Thr or Pro or Leu
  misc_feature (708)..(708): Absent or Glu or Pro or Gln or Asp or Lys or Asn or His or Leu or Gly
  misc_feature (709)..(709): Absent or Glu or Gly or Asp or Ala or Ile or Ser or Pro
  misc_feature (710)..(710): Absent or Leu or Thr or Ile or Phe or Asn or Ala or Ser or His or Pro or Val
  misc_feature (711)..(711): Absent or Leu or Ser or Arg or Cys or Asp or Phe or Ala or Pro or Gln
  misc_feature (712)..(712): Absent or Pro or His or Lys or Asn or Gly or Ala or Thr or Asp or Cys or Gln or Val or Leu
  misc_feature (713)..(713): Absent or Val or Ala or Ile or Gly or Met or Leu or Thr or Ser or Pro or Glu or His
  misc_feature (714)..(714): Val or Absent or Cys or Ser or Met or Leu or Pro or Thr or Asp or Ala or Gln
  misc_feature (715)..(715): Pro or Absent or Gln or Ser or Ala or Leu or Glu or Asp or His or Tyr or Cys
  misc_feature (716)..(716): Ala or Absent or Val or Asp or Glu or Lys or Pro or Ser or Thr or Leu or Met or Phe
  misc_feature (717)..(717): Glu or Absent or Thr or Pro or His or Gly or Lys or Asp or Met or Asn or Ile or Ala
  misc_feature (718)..(718): Ile or Absent or Lys or Ala or Pro or Arg or His or Gln or Leu or Met or Asn or Asp or Val
  misc_feature (719)..(719): Leu or Absent or Arg or Ile or Glu or Val or Ser or Ala or His or Asp or Cys or Pro or Thr
  misc_feature (720)..(720): Glu or Absent or Thr or Asp or Ala or Asn or Gln or Lys or Gly or Arg or Leu or Pro
  misc_feature (721)..(721): Arg or Absent or Asn or Ser or Lys or His or Leu or Tyr or Thr or Asp or Cys
  misc_feature (722)..(722): Val or Absent or Leu or Phe or Thr or Ser or Pro or His or Asn or Gln or Ile or Cys or Ala
  misc_feature (723)..(723): Arg or Absent or Leu or Ser or Gly or Cys or Glu or Ile or Thr or Val or Asp or Ala or Met
  misc_feature (724)..(724): Val or Absent or Gln or Glu or Ser or Lys or Asn or Asp or Arg
  misc_feature (725)..(725): Leu or Absent or Asn or Ser or Cys or Phe or Tyr or His or Lys or Ala
  misc_feature (726)..(726): Ala or Absent or Gln or Asp or Val or Ile or Phe or Pro or His or Asn or Lys or Leu
  misc_feature (727)..(727): Ser or Absent or His or Gly or Gln or Asp or Glu or Ala or Val or Pro
  misc_feature (728)..(728): Ala or Absent or His or Ser or Arg or Asn or Pro or Leu or Gln or Asp
  misc_feature (729)..(729): Lys or Absent or Asp or Asn or Ser or Ile or Glu
  misc_feature (730)..(730): Val or Absent or Ser or Leu or His or Ile
  misc_feature (731)..(731): Glu or Absent or Ala or Gly or Asp or Thr or Ser or Phe or Val or Ile
  misc_feature (732)..(732): Ala or Absent or Leu or Thr or Ser or Pro or Phe
  misc_feature (733)..(733): Arg or Absent or Phe or Val or Ala or Lys or Thr or Ser or Tyr or His or Glu
  misc_feature (734)..(734): Val or Absent or Pro or Cys or Ser or Thr or Asn or His or Tyr or Gln or Leu
  misc_feature (735)..(735): Gly or Absent or Ser or Phe or Asn or Pro or Ala or Thr or Val or Gln
  misc_feature (736)..(736): Lys or Absent or Asp or Leu or His or Pro or Ala or Thr or Ile or Val or Glu
  misc_feature (737)..(737): His or Absent or Ser or Ala or Thr or Asp or Ile or Met or Lys or Gly or Arg
  misc_feature (738)..(738): Gly or Absent or Leu or Lys or Asp or Thr or Ile or Val or Ser or Pro
  misc_feature (739)..(739): Ala or Absent or Gly or Ile or Asp or Asn or Ser or Val or Thr or Met
  misc_feature (740)..(740): Pro or Absent or Gly or Asn or Ser or Met or Thr or Ala or Asp or Phe
  misc_feature (741)..(741): Arg or Absent or Ser or Asn or Thr or Leu or Pro or Glu or Asp or Lys or Gln or Gly or Ala
  misc_feature (742)..(742): Asp or Absent or His or Asn or Ala or Val or Met or Ile or Gly or Glu or Thr or Pro or Gln or Lys
  misc_feature (743)..(743): Ala or Absent or Asp or Glu or Arg or Gln or Leu or Ser
  misc_feature (744)..(744): Val or Absent or Asp or Lys or Gly or Glu or Gln or Ser
  misc_feature (745)..(745): Gly or Absent or Val or Met or Lys or Thr or Ser or Tyr or Asn or Glu or Ala or Pro or Arg
  misc_feature (746)..(746): Lys or Absent or Leu or Thr or Met or Ile or Val or Ala or Pro or Ser or Asp
  misc_feature (747)..(747): Gly or Absent or Glu or Ser or Pro or Thr or Asn or Lys or Ile or Met or Asp or Ala
  misc_feature (748)..(748): Met or Absent or Ser or Asp or Glu or Tyr or His or Asn
  misc_feature (750)..(750): Val or Absent or Asp or Lys or Arg
  misc_feature (752)..(752): Thr or Absent or Met or Leu or Ile
  misc_feature (753)..(753): Val or Absent or Glu or Ile or Leu or Asp or Phe
  misc_feature (754)..(754): Lys or Absent or Ala or Ser or Pro or Thr or Ile or Leu
  misc_feature (756)..(756): Ser or Absent or Ala or Pro or Leu or Thr
  misc_feature (757)..(757): Ser or Absent or Ala or Leu or Glu or Pro
  misc_feature (758)..(758): Pro or Absent or Lys or Asn or Ile or Val or Met or Leu or Ala
  misc_feature (759)..(759): Gly or Absent or Ser or Glu or Asn or Lys or Asp or His or Ala
  misc_feature (760)..(760): Gln or Absent or Val or Leu or Arg or Met or Ala or Pro or Ser
  misc_feature (761)..(761): Ser or Absent or Val or Gly or Lys or Glu or Gln or Asp or Leu or Asn
  misc_feature (762)..(762): Asp or Absent or Pro or Ser or Ala or Thr or Glu
  misc_feature (763)..(763): Ala or Absent or Val or Gln or Leu or Pro or Gly
  misc_feature (764)..(764): Asp or Absent or Arg or Ser or Ala or Thr
  misc_feature (765)..(765): Lys or Absent or Met or Gln or Val or Ile or Leu or Pro
  misc_feature (766)..(766): Thr or Absent or Lys or Pro or Val or Leu
  misc_feature (768)..(768): Asp or Absent or Ala or Ser or Phe or Val or Pro or Met or Leu or Ile or Arg
  misc_feature (769)..(769): Asp or Absent or Trp or Arg or Asn or His or Leu or Ser or Lys
  misc_feature (770)..(770): Ala or Absent or Gln or Lys or Cys or Arg or His or Pro or Met or Glu or Phe
  misc_feature (771)..(771): Gly or Absent or Ser or Lys
  misc_feature (772)..(772): Absent or Arg
  misc_feature (773)..(773): Absent or Arg
  misc_feature (774)..(774): Absent or Ser
  misc_feature (775)..(775): Absent or Glu or Lys or Arg or Ala or Ser or Thr
  misc_feature (776)..(776): Absent or Gln or Ser or Pro or Thr or Ile or Lys
  misc_feature (777)..(777): Absent or Gln or Met or Arg or Lys or Asn or Glu
  misc_feature (778)..(778): Ala or Absent or Gln or His or Arg or Lys or Ser
  misc_feature (779)..(779): Lys or Absent or Pro or Gln or Ser or Thr or Cys or Ala
  misc_feature (780)..(780): Gly or Absent or Glu or Gln or Asp or Leu
  misc_feature (781)..(781): Val or Absent or Met or Ala or Phe or Ile or Asn or Leu or Ser or Gln
  misc_feature (782)..(782): Arg or Tyr or Val or Pro or Ala or Gly or Absent or Ser
  misc_feature (786)..(786): His or Ser or Ile or Val or Thr or Absent
  misc_feature (793)..(793): Lys or Asp or Ser or Ala or Thr or Val or Absent
  misc_feature (800)..(800): Asp or Glu or Gln or His or X or Absent or Ser or Leu
  misc_feature (804)..(804): Arg or Ser or Lys or Asn or Thr or His or Ile or Glu or Absent
  misc_feature (809)..(809): Absent or Arg
  misc_feature (810)..(810): Absent or Leu
  misc_feature (811)..(811): Absent or Leu
  misc_feature (812)..(812): Absent or Cys
  misc_feature (813)..(813): Absent or Ile
  misc_feature (814)..(814): Absent or Ser
  misc_feature (815)..(815): Absent or Ile
  misc_feature (816)..(816): Absent or Cys
  misc_feature (823)..(823): Lys or Cys or Ser or Leu or Val or Ile or Met or Gly or Absent
  misc_feature (824)..(824): Ser or Ala or His or Cys or Arg or X or Gln or Pro or Absent
  misc_feature (827)..(827): Pro or Asp or Asn or Glu or Absent
  misc_feature (828)..(828): Ala or Asn or His or Asp or Lys or Gly or Gln or Absent
  misc_feature (830)..(830): Gly or Ala or Asn or Asp or Lys or Absent or Ser or X
  misc_feature (833)..(833): Absent or Thr
  misc_feature (834)..(834): Absent or Tyr
  misc_feature (835)..(835): Absent or Val
  misc_feature (836)..(836): Absent or Asp
  misc_feature (837)..(837): Absent or Leu
  misc_feature (844)..(844): Absent or Cys or Leu
  misc_feature (845)..(845): Absent or X or Val
  misc_feature (846)..(846): Absent or Leu
  misc_feature (847)..(847): Absent or Phe
  misc_feature (848)..(848): Absent or Pro
  misc_feature (849)..(849): Absent or Arg
  misc_feature (850)..(850): Absent or Ile
  misc_feature (851)..(851): Absent or Ser
  misc_feature (852)..(852): Absent or Phe
  misc_feature (853)..(853): Absent or Val
  misc_feature (854)..(854): Absent or Val
  misc_feature (855)..(855): Absent or Trp
  misc_feature (856)..(856): Absent or Leu
  misc_feature (857)..(857): Absent or Gly
  misc_feature (858)..(858): Absent or His
  misc_feature (859)..(859): Absent or Val
  misc_feature (860)..(860): Absent or Ser
  misc_feature (861)..(861): Absent or Phe
  misc_feature (862)..(862): Absent or Ser
  misc_feature (863)..(863): Absent or Thr
  misc_feature (864)..(864): Absent or Arg
  misc_feature (865)..(865): Absent or Met
  misc_feature (866)..(866): Absent or Leu
  misc_feature (867)..(867): Absent or His
  misc_feature (868)..(868): Absent or Leu
  misc_feature (869)..(869): Absent or Glu
  misc_feature (870)..(870): Absent or Thr
  misc_feature (871)..(871): Absent or Lys
  misc_feature (872)..(872): Absent or Glu
  misc_feature (873)..(873): Absent or Thr
  misc_feature (874)..(874): Absent or His
  misc_feature (875)..(875): Absent or Ser
  misc_feature (876)..(876): Absent or Cys
  misc_feature (877)..(877): Absent or Thr
  misc_feature (878)..(878): Absent or Ser
  misc_feature (879)..(879): Absent or Thr
  misc_feature (880)..(880): Absent or Asn
  misc_feature (881)..(881): Absent or Pro
  misc_feature (882)..(882): Absent or Ile
  misc_feature (883)..(883): Absent or Arg
  misc_feature (884)..(884): Absent or Thr
  misc_feature (885)..(885): Absent or Leu
  misc_feature (886)..(886): Absent or Glu
  misc_feature (887)..(887): Absent or Lys
  misc_feature (888)..(888): Absent or Lys
  misc_feature (889)..(889): Absent or Gln
  misc_feature (890)..(890): Absent or Val
  misc_feature (891)..(891): Absent or Gln
  misc_feature (892)..(892): Absent or Leu
  misc_feature (893)..(893): Absent or Arg
  misc_feature (894)..(894): Absent or Asp
  misc_feature (895)..(895): Absent or Gln
  misc_feature (896)..(896): Absent or Ile
  misc_feature (897)..(897): Absent or Thr
  misc_feature (898)..(898): Absent or Phe
  misc_feature (899)..(899): Absent or Pro
  misc_feature (900)..(900): Absent or Leu
  misc_feature (901)..(901): Absent or Leu
  misc_feature (902)..(902): Absent or Asp
  misc_feature (903)..(903): Absent or Trp
  misc_feature (904)..(904): Absent or Lys
  misc_feature (905)..(905): Absent or Leu
  misc_feature (906)..(906): Absent or Leu
  misc_feature (907)..(907): Absent or Gly
  misc_feature (908)..(908): Absent or Cys
  misc_feature (909)..(909): Absent or Phe
  misc_feature (910)..(910): Absent or Ala
  misc_feature (911)..(911): Absent or Leu
  misc_feature (912)..(912): Absent or Tyr
  misc_feature (913)..(913): Absent or Ile
  misc_feature (914)..(914): Absent or Ala
  misc_feature (915)..(915): Absent or Ala
  misc_feature (916)..(916): Absent or Phe
  misc_feature (917)..(917): Absent or Ser
  misc_feature (918)..(918): Absent or Gly
  misc_feature (919)..(919): Absent or Asn
  misc_feature (920)..(920): Absent or Gly
  misc_feature (921)..(921): Absent or Leu
  misc_feature (922)..(922): Absent or Thr
  misc_feature (923)..(923): Absent or Val
  misc_feature (924)..(924): Absent or Ser
  misc_feature (925)..(925): Absent or Lys
  misc_feature (926)..(926): Absent or Leu
  misc_feature (927)..(927): Absent or Trp
  misc_feature (928)..(928): Absent or Cys
  misc_feature (929)..(929): Absent or Glu
  misc_feature (930)..(930): Absent or Gln
  misc_feature (941)..(941): Ser or Val or Lys or Arg or Gln or Thr or Absent
  misc_feature (962)..(962): Asp or Absent or Ala or Asn or Thr or Val or Arg or Ser or Gly or Lys
  misc_feature (965)..(965): Ala or Absent or Gly or Thr or Ser or Val or Arg
  misc_feature (970)..(970): Ala or Absent or Arg or Gln or His or Asn
  misc_feature (972)..(972): Arg or Absent or Gly or Met or Gln or Pro or Val or Ala or Thr or Ser
  misc_feature (973)..(973): Lys or Absent or Gln or Leu or Gly or Asp or His
  misc_feature (974)..(974): Gly or Absent or Gln or Pro or His or Val or Thr or Ser or Leu
  misc_feature (975)..(975): Arg or Absent or Leu or Trp or Lys or Phe or Glu or Gln or His or Thr or Gly or Asn
  misc_feature (976)..(976): Lys or Absent or Gln or Arg or Gly or Ala or Ile or Val or Leu or Phe or His or Ser or Pro
  misc_feature (977)..(977): Pro or Absent or Gln or Ser or Gly or Glu or Lys or Leu or Arg or Thr
  misc_feature (978)..(978): Val or Absent or Asn or Ser or Arg or His or Gln or Glu or Gly or Thr
  misc_feature (979)..(979): Asn or Absent or Val or Leu or Glu or Gln or His or Gly or Ala or Pro
  misc_feature (980)..(980): Lys or Absent or Leu or Ser or Asn or Glu or Gln or His or Pro or Val or Ala or Thr or Gly
  misc_feature (981)..(981): Met or Absent or Cys or Phe or Lys or Leu or Gln or Thr or Glu or Ala or Gly or Ser
  misc_feature (982)..(982): Ala or Absent or Val or Leu or Gly or Ser or Pro or Lys or Thr or Gln or His
  misc_feature (983)..(983): Gln or Absent or Leu or Tyr or Glu or Asp or Pro or Ala or Lys
  misc_feature (984)..(984): Ala or Absent or Leu or Tyr or Gln or Pro or Asn or Thr or Cys or Glu or Ile or Asp or Val or Phe
  misc_feature (985)..(985): Absent or Leu or Tyr or Glu or Gln or Cys or Val or Thr or Lys or Pro or Met or Arg or Ala
  misc_feature (986)..(986): Absent or Leu or Tyr or Thr or Pro or Phe or Asp or Ser or Lys or Arg or Ile or Ala or Val
  misc_feature (987)..(987): Absent or Leu or Tyr or Gln or Ile or Ser or Thr or Met or His
  misc_feature (988)..(988): Absent or Met or Ser or Asp or Leu or Phe or Gly or Ala or Pro or Thr or Asn
  misc_feature (989)..(989): Absent or Ile or Gln or Ser or Leu or Gly or Asp or Val or Arg or Ala or Thr or Cys
  misc_feature (990)..(990): Absent or Met or Thr or Lys or Glu or Ala or Pro or Gln or Gly
  misc_feature (991)..(991): Absent or Thr or Lys or Val or Gln or His or Leu or Pro or Gly or Arg or Met or Ile
  misc_feature (992)..(992): Absent or Glu or Ser or Val or Ala or Gly or Leu
  misc_feature (993)..(993): Absent or Gly or Ala or Ser or Val or Asp or Gln or Arg or Glu or Phe or Leu
  misc_feature (994)..(994): Absent or Leu or Ile or Lys or Arg or Glu
  misc_feature (995)..(995): Absent or Leu or Glu or Val or Asn or Asp or Ser or Ala
  misc_feature (996)..(996): Absent or Leu or Val or Thr or Ser or Gly or Met
  misc_feature (997)..(997): Absent or Leu or Val or Glu or Ala or Ile or Ser or Gln
  misc_feature (998)..(998): Absent or Ser or Gln or Glu or Gly or Ala or Lys
  misc_feature (999)..(999): Absent or Pro or Leu or Asp or Val or Met
  misc_feature (1000)..(1000): Absent or Leu or Asn or Ile or Val
  misc_feature (1001)..(1001): Absent or Cys or Pro or Gln or His or Leu
  misc_feature (1002)..(1002): Absent or Ile or Val or Ser or Asp
  misc_feature (1003)..(1003): Absent or Thr or Pro or Ile or Ser
  misc_feature (1004)..(1004): Absent or Thr or Asn or Glu
  misc_feature (1005)..(1005): Absent or Thr or Phe or Arg
  misc_feature (1006)..(1006): Absent or Ile or Asn or Phe
  misc_feature (1007)..(1007): Absent or Asp or Asn or Cys
  misc_feature (1008)..(1008): Absent or Asp or Leu or Phe
  misc_feature (1009)..(1009): Absent or Tyr or Leu or Met
  misc_feature (1010)..(1010): Absent or Val or Ser or Asp
  misc_feature (1011)..(1011): Absent or Leu or Ala
  misc_feature (1012)..(1012): Absent or Ala or Leu or Ile
  misc_feature (1013)..(1013): Absent or Asn or Leu
  misc_feature (1014)..(1014): Absent or Lys or Thr or Pro
  misc_feature (1015)..(1015): Absent or Gly or Lys or Val
  misc_feature (1016)..(1016): Absent or Met or Lys or Pro
  misc_feature (1017)..(1017): Absent or Lys or Thr or Val
  misc_feature (1018)..(1018): Absent or Arg or Asn or Asp
  misc_feature (1019)..(1019): Absent or Ile or Met or Gly
  misc_feature (1020)..(1020): Absent or Cys or Phe
  misc_feature (1021)..(1021): Absent or Ser or Arg
  misc_feature (1022)..(1022): Absent or Val or Phe
  misc_feature (1023)..(1023): Absent or Ser or Asp
  misc_feature (1024)..(1024): Absent or Ser or Thr
  misc_feature (1025)..(1025): Absent or Val or Gly
  misc_feature (1026)..(1026): Absent or Gln or Ser
  misc_feature (1027)..(1027): Absent or Leu or Gly
  misc_feature (1028)..(1028): Absent or Phe or Ser
  misc_feature (1029)..(1029): Absent or Ser or Cys
  misc_feature (1030)..(1030): Absent or Arg or Cys
  misc_feature (1031)..(1031): Absent or Ser or Lys
  misc_feature (1032)..(1032): Absent or Phe or Pro
  misc_feature (1033)..(1033): Absent or Arg
  misc_feature (1034)..(1034): Absent or Ala or Asn
  misc_feature (1035)..(1035): Absent or Leu or Asn
  misc_feature (1036)..(1036): Absent or Ala or Leu
  misc_feature (1037)..(1037): Absent or Ser or Glu
  misc_feature (1038)..(1038): Absent or Pro or Ser
  misc_feature (1039)..(1039): Absent or Arg or Gly
  misc_feature (1040)..(1040): Absent or Ser or Thr
  misc_feature (1041)..(1041): Absent or Leu or Thr
  misc_feature (1042)..(1042): Absent or Asn
  misc_feature (1043)..(1043): Absent or Tyr or Arg
  misc_feature (1044)..(1044): Absent or Pro or Phe
  misc_feature (1045)..(1045): Absent or Leu or Thr
  misc_feature (1046)..(1046): Absent or Gln or Cys
  misc_feature (1047)..(1047): Absent or Cys or Phe
  misc_feature (1048)..(1048): Absent or Ile or Asn
  misc_feature (1049)..(1049): Absent or Lys or Glu
  misc_feature (1050)..(1050): Absent or Arg or Ser
  misc_feature (1051)..(1051): Absent or Ser or Glu
  misc_feature (1052)..(1052): Absent or Ser
  misc_feature (1053)..(1053): Absent or Val or Gln
  misc_feature (1054)..(1054): Absent or Arg or Ser
  misc_feature (1055)..(1055): Absent or Met or Asn
  misc_feature (1056)..(1056): Absent or Glu or Pro
  misc_feature (1057)..(1057): Absent or Ser
  misc_feature (1058)..(1058): Absent or Ser or Pro
  misc_feature (1059)..(1059): Absent or Asn or Thr
  misc_feature (1060)..(1060): Absent or Phe or Glu
  misc_feature (1061)..(1061): Absent or Ser
  misc_feature (1062)..(1062): Absent or Ser or Lys
  misc_feature (1063)..(1063): Absent or Gly or Val
  misc_feature (1064)..(1064): Absent or Val or Cys
  misc_feature (1065)..(1065): Absent or Arg or Ser
  misc_feature (1066)..(1066): Absent or Thr or Asp
  misc_feature (1067)..(1067): Absent or Glu or Tyr
  misc_feature (1068)..(1068): Absent or Ser or Leu
  misc_feature (1069)..(1069): Absent or Ser or Pro
  misc_feature (1070)..(1070): Absent or Val
  misc_feature (1071)..(1071): Absent or Lys or Phe
  misc_feature (1072)..(1072): Absent or Pro or Lys
  misc_feature (1073)..(1073): Absent or Arg or Tyr
  misc_feature (1074)..(1074): Absent or Gly or Ile
  misc_feature (1075)..(1075): Absent or Ala or Asn
  misc_feature (1076)..(1076): Absent or Leu or Asp
  misc_feature (1077)..(1077): Absent or Ile or Met
  misc_feature (1078)..(1078): Absent or Val or Leu
  misc_feature (1079)..(1079): Absent or Leu or Met
  misc_feature (1080)..(1080): Absent or Glu
  misc_feature (1081)..(1081): Absent or Gly or Glu
  misc_feature (1082)..(1082): Absent or Leu or Asp
  misc_feature (1083)..(1083): Absent or Asp or Leu
  misc_feature (1084)..(1084): Absent or Arg or Glu
  misc_feature (1085)..(1085): Absent or Ser or Gly
  misc_feature (1086)..(1086): Absent or Gly or Gln
  misc_feature (1087)..(1087): Absent or Lys or Ser
  misc_feature (1088)..(1088): Absent or Ser or Cys
  misc_feature (1089)..(1089): Absent or Thr or Met
  misc_feature (1090)..(1090): Absent or Gln or Leu
  misc_feature (1091)..(1091): Absent or Cys or Glu
  misc_feature (1092)..(1092): Absent or Ala or Asp
  misc_feature (1093)..(1093): Absent or Lys or Ser
  misc_feature (1094)..(1094): Absent or Leu
  misc_feature (1095)..(1095): Absent or Leu or Ala
  misc_feature (1096)..(1096): Absent or Ser or Leu
  misc_feature (1097)..(1097): Absent or Phe or Gln
  misc_feature (1098)..(1098): Absent or Leu or Ala
  misc_feature (1099)..(1099): Absent or Asn or Ala
  misc_feature (1100)..(1100): Absent or Gly or Glu
  misc_feature (1101)..(1101): Absent or Leu or Arg
  misc_feature (1102)..(1102): Absent or Gly or Ser
  misc_feature (1103)..(1103): Absent or His or Phe
  misc_feature (1104)..(1104): Absent or Pro or Phe
  misc_feature (1105)..(1105): Absent or Thr or Glu
  misc_feature (1106)..(1106): Absent or Glu or Val
  misc_feature (1107)..(1107): Absent or Leu
  misc_feature (1108)..(1108): Absent or Trp or Gln
  misc_feature (1109)..(1109): Absent or Arg or Asp
  misc_feature (1110)..(1110): Absent or Phe or Gln
  misc_feature (1111)..(1111): Absent or Pro or Thr
  misc_feature (1112)..(1112): Absent or Asp or Pro
  misc_feature (1113)..(1113): Absent or Arg or Ile
  misc_feature (1114)..(1114): Absent or Glu or Ser
  misc_feature (1115)..(1115): Absent or Thr or Gly
  misc_feature (1116)..(1116): Absent or Ser or Asp
  misc_feature (1117)..(1117): Absent or Val or Leu
  misc_feature (1118)..(1118): Absent or Gly or Glu
  misc_feature (1119)..(1119): Absent or Gln or Asp
  misc_feature (1120)..(1120): Absent or Met or Gly
  misc_feature (1121)..(1121): Absent or Ile or Ser
  misc_feature (1122)..(1122): Absent or Ser or Leu
  misc_feature (1123)..(1123): Absent or Ala or Gly
  misc_feature (1124)..(1124): Absent or Tyr or Asn
  misc_feature (1125)..(1125): Absent or Leu or Phe
  misc_feature (1126)..(1126): Absent or Ser
  misc_feature (1127)..(1127): Absent or Asn or Ser
  misc_feature (1128)..(1128): Absent or Lys or Ile
  misc_feature (1129)..(1129): Absent or Ser or Thr
  misc_feature (1130)..(1130): Absent or Gln or Ser
  misc_feature (1131)..(1131): Absent or Leu
  misc_feature (1132)..(1132): Absent or Asp or His
  misc_feature (1133)..(1133): Absent or Asp or Gln
  misc_feature (1134)..(1134): Absent or His or Pro
  misc_feature (1135)..(1135): Absent or Thr or Glu
  misc_feature (1136)..(1136): Absent or Ile or Val
  misc_feature (1137)..(1137): Absent or His or Ser
  misc_feature (1138)..(1138): Absent or Leu or Glu
  misc_feature (1139)..(1139): Absent or Leu or Glu
  misc_feature (1140)..(1140): Absent or Phe or Ser
  misc_feature (1141)..(1141): Absent or Ser or Thr
  misc_feature (1142)..(1142): Absent or Ala or Arg
  misc_feature (1143)..(1143): Absent or Asn or Arg
  misc_feature (1144)..(1144): Absent or Arg or Tyr
  misc_feature (1145)..(1145): Absent or Trp or Arg
  misc_feature (1146)..(1146): Absent or Glu or His
  misc_feature (1147)..(1147): Absent or Lys or Arg
  misc_feature (1148)..(1148): Absent or Arg or Asp
  misc_feature (1149)..(1149): Absent or Ser or Asp
  misc_feature (1150)..(1150): Absent or Leu or Asp
  misc_feature (1151)..(1151): Absent or Met or Glu
  misc_feature (1152)..(1152): Absent or Glu or Asp
  misc_feature (1153)..(1153): Absent or Glu or Asp
  misc_feature (1154)..(1154): Absent or Lys or Asp
  misc_feature (1155)..(1155): Absent or Leu
  misc_feature (1156)..(1156): Absent or Lys or Glu
  misc_feature (1157)..(1157): Absent or Thr or Ser
  misc_feature (1158)..(1158): Absent or Gly
  misc_feature (1159)..(1159): Absent or Thr or Arg
  misc_feature (1160)..(1160): Absent or Thr or Lys
  misc_feature (1161)..(1161): Absent or Leu or Ser
  misc_feature (1162)..(1162): Absent or Ile or Lys
  misc_feature (1163)..(1163): Absent or Val or Leu
  misc_feature (1164)..(1164): Absent or Asp or Pro
  misc_feature (1165)..(1165): Absent or Arg or Ala
  misc_feature (1166)..(1166): Absent or Tyr or Ile
  misc_feature (1167)..(1167): Absent or Ser
  misc_feature (1168)..(1168): Absent or Tyr or Thr
  misc_feature (1169)..(1169): Absent or Ser or Val
  misc_feature (1170)..(1170): Absent or Gly or Asp
  misc_feature (1171)..(1171): Absent or Val or Glu
  misc_feature (1172)..(1172): Absent or Ala or Leu
  misc_feature (1173)..(1173): Absent or Phe or Ala
  misc_feature (1174)..(1174): Absent or Ser or Glu
  misc_feature (1175)..(1175): Absent or Ser or Lys
  misc_feature (1176)..(1176): Absent or Ala or Phe
  misc_feature (1177)..(1177): Absent or Lys or Glu
  misc_feature (1178)..(1178): Absent or Gly or Glu
  misc_feature (1179)..(1179): Absent or Leu or Val
  misc_feature (1180)..(1180): Absent or Asp or Leu
  misc_feature (1181)..(1181): Absent or Ile or Leu
  misc_feature (1182)..(1182): Absent or Glu or Val
  misc_feature (1183)..(1183): Absent or Trp or Cys
  misc_feature (1184)..(1184): Absent or Cys or Gln
  misc_feature (1185)..(1185): Absent or Lys
  misc_feature (1186)..(1186): Absent or Ala or Asn
  misc_feature (1187)..(1187): Absent or Pro or Asp
  misc_feature (1188)..(1188): Absent or Glu or Gln
  misc_feature (1189)..(1189): Absent or Ile or Gly
  misc_feature (1190)..(1190): Absent or Gly or Glu
  misc_feature (1191)..(1191): Absent or Leu or Ala
  misc_feature (1192)..(1192): Absent or Leu or Thr
  misc_feature (1193)..(1193): Absent or Ala or Glu
  misc_feature (1194)..(1194): Absent or Pro or Lys
  misc_feature (1195)..(1195): Absent or Asp or Lys
  misc_feature (1196)..(1196): Absent or Ser or Thr
  misc_feature (1197)..(1197): Absent or Val or Arg
  misc_feature (1198)..(1198): Absent or Leu or His
  misc_feature (1199)..(1199): Absent or Tyr or Val
  misc_feature (1200)..(1200): Absent or Leu or Lys
  misc_feature (1201)..(1201): Absent or Asp or Gly
  misc_feature (1202)..(1202): Absent or Ile or Ser
  misc_feature (1203)..(1203): Absent or Ser
  misc_feature (1204)..(1204): Absent or Pro or Asn
  misc_feature (1205)..(1205): Absent or Glu or Arg
  misc_feature (1206)..(1206): Absent or Arg or Tyr
  misc_feature (1207)..(1207): Absent or Ala or Lys
  misc_feature (1208)..(1208): Absent or Ala or Gln
  misc_feature (1209)..(1209): Absent or Glu or Gln
  misc_feature (1210)..(1210): Absent or Arg or Lys
  misc_feature (1211)..(1211): Absent or Gly or Ser
  misc_feature (1212)..(1212): Absent or Gly or Asp
  misc_feature (1213)..(1213): Absent or Tyr or Gln
  misc_feature (1214)..(1214): Absent or Gly or Pro
  misc_feature (1215)..(1215): Absent or Asp or Val
  misc_feature (1216)..(1216): Absent or Glu or Asp
  misc_feature (1217)..(1217): Absent or Arg or Met
  misc_feature (1218)..(1218): Absent or Tyr or Arg
  misc_feature (1219)..(1219): Absent or Glu or Asn
  misc_feature (1220)..(1220): Absent or Arg or Leu
  misc_feature (1221)..(1221): Absent or Val or Leu
  misc_feature (1222)..(1222): Absent or Glu or Met
  misc_feature (1223)..(1223): Absent or Phe or Gln
  misc_feature (1224)..(1224): Absent or Gln or Cys
  misc_feature (1225)..(1225): Absent or Lys or Ala
  misc_feature (1226)..(1226): Absent or Lys or Gln
  misc_feature (1227)..(1227): Absent or Val or Ala
  misc_feature (1228)..(1228): Absent or Ala or Val
  misc_feature (1229)..(1229): Absent or Asp or Ala
  misc_feature (1230)..(1230): Absent or Phe or Ser
  misc_feature (1231)..(1231): Absent or Tyr or Phe
  misc_feature (1232)..(1232): Absent or Gln or Asp
  misc_feature (1233)..(1233): Absent or Thr or Gln
  misc_feature (1234)..(1234): Absent or Leu or Arg
  misc_feature (1235)..(1235): Absent or Gly or Arg
  misc_feature (1236)..(1236): Absent or Asp or Ala
  misc_feature (1237)..(1237): Absent or Ser or Phe
  misc_feature (1238)..(1238): Absent or Ser or Glu
  misc_feature (1239)..(1239): Absent or Trp or Lys
  misc_feature (1240)..(1240): Absent or Lys or Leu
  misc_feature (1241)..(1241): Absent or Ile or Lys
  misc_feature (1242)..(1242): Absent or Ile or Glu
  misc_feature (1243)..(1243): Absent or Asn or Ile
  misc_feature (1244)..(1244): Absent or Ala or Arg
  misc_feature (1245)..(1245): Absent or Ser or Glu
  misc_feature (1246)..(1246): Absent or Asp or His
  misc_feature (1247)..(1247): Absent or Ala or Ser
  misc_feature (1248)..(1248): Absent or Met or Ser
  misc_feature (1249)..(1249): Absent or Glu or Arg
  misc_feature (1250)..(1250): Absent or Glu or His
  misc_feature (1251)..(1251): Absent or Val or Gly
  misc_feature (1252)..(1252): Absent or Glu or Asp
  misc_feature (1253)..(1253): Absent or Lys or Ala
  misc_feature (1254)..(1254): Absent or Lys or Thr
  misc_feature (1255)..(1255): Absent or Ile or Gln
  misc_feature (1256)..(1256): Absent or Gln or Arg
  misc_feature (1257)..(1257): Absent or Gln or Leu
  misc_feature (1258)..(1258): Absent or Val or Gly
  misc_feature (1259)..(1259): Absent or Val or Tyr
  misc_feature (1260)..(1260): Absent or Leu or His
  misc_feature (1261)..(1261): Absent or Asp or Phe
  misc_feature (1262)..(1262): Absent or Gln or Ala
  misc_feature (1263)..(1263): Absent or Val or Glu
  misc_feature (1264)..(1264): Absent or Lys or Ala
  misc_feature (1265)..(1265): Absent or Glu or Leu
  misc_feature (1266)..(1266): Absent or Cys or Glu
  misc_feature (1267)..(1267): Absent or Thr or Ala
  misc_feature (1268)..(1268): Absent or Glu or Arg
  misc_feature (1269)..(1269): Absent or Gly or Ile
  misc_feature (1270)..(1270): Absent or Lys or Thr
  misc_feature (1271)..(1271): Absent or Pro or Gly
  misc_feature (1272)..(1272): Absent or Leu or Thr
  misc_feature (1273)..(1273): Absent or Ser or Met
  misc_feature (1274)..(1274): Absent or Leu or Thr
  misc_feature (1275)..(1275): Absent or Leu or Thr
  misc_feature (1276)..(1276): Absent or Trp or Pro
  misc_feature (1277)..(1277): Absent or Ser or Ile
  misc_feature (1278)..(1278): Absent or Ser
  misc_feature (1279)..(1279): Absent or Ala
  misc_feature (1280)..(1280): Absent or Thr
  misc_feature (1281)..(1281): Absent or Ser
  misc_feature (1282)..(1282): Absent or Ser
  misc_feature (1283)..(1283): Absent or Arg
  misc_feature (1284)..(1284): Absent or Thr
  misc_feature (1285)..(1285): Absent or Ser
  misc_feature (1286)..(1286): Absent or Met
  misc_feature (1287)..(1287): Absent or Val
  misc_feature (1288)..(1288): Absent or Asp
  misc_feature (1289)..(1289): Absent or Ile
  misc_feature (1290)..(1290): Absent or Leu
  misc_feature (1291)..(1291): Absent or Lys
  misc_feature (1292)..(1292): Absent or Ala
  misc_feature (1293)..(1293): Absent or Tyr
  misc_feature (1294)..(1294): Absent or Lys
  misc_feature (1295)..(1295): Absent or Gly
  misc_feature (1296)..(1296): Absent or Phe
  misc_feature (1297)..(1297): Absent or Val
  misc_feature (1298)..(1298): Absent or Gln
  misc_feature (1299)..(1299): Absent or Ala
  misc_feature (1300)..(1300): Absent or Cys
  misc_feature (1301)..(1301): Absent or Pro
  misc_feature (1302)..(1302): Absent or Thr
  misc_feature (1303)..(1303): Absent or Leu
  misc_feature (1304)..(1304): Absent or Ile
  misc_feature (1305)..(1305): Absent or Met
  misc_feature (1306)..(1306): Absent or Cys
  misc_feature (1307)..(1307): Absent or Tyr
  misc_feature (1308)..(1308): Absent or Phe
  misc_feature (1309)..(1309): Absent or Thr
  misc_feature (1310)..(1310): Absent or Ala
  misc_feature (1311)..(1311): Absent or Asn
  misc_feature (1312)..(1312): Absent or Arg
  misc_feature (1313)..(1313): Absent or Thr
  misc_feature (1314)..(1314): Absent or Ile
  misc_feature (1315)..(1315): Absent or Asn
  misc_feature (1316)..(1316): Absent or Glu
  misc_feature (1317)..(1317): Absent or Leu
  misc_feature (1318)..(1318): Absent or Ala
  misc_feature (1319)..(1319): Absent or Ser
  misc_feature (1320)..(1320): Absent or Lys
  misc_feature (1321)..(1321): Absent or Ala
  misc_feature (1322)..(1322): Absent or Thr
  misc_feature (1323)..(1323): Absent or Thr
  misc_feature (1324)..(1324): Absent or Leu
  misc_feature (1325)..(1325): Absent or His
  misc_feature (1326)..(1326): Absent or Ile
  misc_feature (1327)..(1327): Absent or Ile
  misc_feature (1328)..(1328): Absent or Asp
  misc_feature (1329)..(1329): Absent or Phe
  misc_feature (1330)..(1330): Absent or Gly
  misc_feature (1331)..(1331): Absent or Ile
  misc_feature (1332)..(1332): Absent or Leu
  misc_feature (1333)..(1333): Absent or Tyr
  misc_feature (1334)..(1334): Absent or Gly
  misc_feature (1335)..(1335): Absent or Phe
  misc_feature (1336)..(1336): Absent or Gln
  misc_feature (1337)..(1337): Absent or Trp
  misc_feature (1338)..(1338): Absent or Pro
  misc_feature (1339)..(1339): Absent or Cys
  misc_feature (1340)..(1340): Absent or Leu
  misc_feature (1341)..(1341): Absent or Ile
  misc_feature (1342)..(1342): Absent or Gln
  misc_feature (1343)..(1343): Absent or Ala
  misc_feature (1344)..(1344): Absent or Leu
  misc_feature (1345)..(1345): Absent or Ser
  misc_feature (1346)..(1346): Absent or Lys
  misc_feature (1347)..(1347): Absent or Arg
  misc_feature (1348)..(1348): Absent or Asp
  misc_feature (1349)..(1349): Absent or Ile
  misc_feature (1350)..(1350): Absent or Gly
  misc_feature (1351)..(1351): Absent or Pro
  misc_feature (1352)..(1352): Absent or Pro
  misc_feature (1353)..(1353): Absent or Leu
  misc_feature (1354)..(1354): Absent or Leu
  misc_feature (1355)..(1355): Absent or Arg
  misc_feature (1356)..(1356): Absent or Val
  misc_feature (1357)..(1357): Absent or Thr
  misc_feature (1358)..(1358): Absent or Gly
  misc_feature (1359)..(1359): Absent or Ile
  misc_feature (1360)..(1360): Absent or Glu
  misc_feature (1361)..(1361): Absent or Leu
  misc_feature (1362)..(1362): Absent or Pro
  misc_feature (1363)..(1363): Absent or Gln
  misc_feature (1364)..(1364): Absent or Ser
  misc_feature (1365)..(1365): Absent or Gly
  misc_feature (1366)..(1366): Absent or Phe
  misc_feature (1367)..(1367): Absent or Arg
  misc_feature (1368)..(1368): Absent or Pro
  misc_feature (1369)..(1369): Absent or Ser
  misc_feature (1370)..(1370): Absent or Glu
  misc_feature (1371)..(1371): Absent or Arg
  misc_feature (1372)..(1372): Absent or Val
  misc_feature (1373)..(1373): Absent or Glu
  misc_feature (1374)..(1374): Absent or Glu
  misc_feature (1375)..(1375): Absent or Thr
  misc_feature (1376)..(1376): Absent or Gly
  misc_feature (1377)..(1377): Absent or Arg
  misc_feature (1378)..(1378): Absent or Arg
  misc_feature (1379)..(1379): Absent or Leu
  misc_feature (1380)..(1380): Absent or Lys
  misc_feature (1381)..(1381): Absent or Arg
  misc_feature (1382)..(1382): Absent or Phe
  misc_feature (1383)..(1383): Absent or Cys
  misc_feature (1384)..(1384): Absent or Asp
  misc_feature (1385)..(1385): Absent or Lys
  misc_feature (1386)..(1386): Absent or Phe
  misc_feature (1387)..(1387): Absent or Asn
  misc_feature (1388)..(1388): Absent or Val
  misc_feature (1389)..(1389): Absent or Pro
  misc_feature (1390)..(1390): Absent or Phe
  misc_feature (1391)..(1391): Absent or Glu
  misc_feature (1392)..(1392): Absent or Tyr
  misc_feature (1393)..(1393): Absent or Ser
  misc_feature (1394)..(1394): Absent or Phe
  misc_feature (1395)..(1395): Absent or Ile
  misc_feature (1396)..(1396): Absent or Ala
  misc_feature (1397)..(1397): Absent or Lys
  misc_feature (1398)..(1398): Absent or Asn
  misc_feature (1399)..(1399): Absent or Trp
  misc_feature (1400)..(1400): Absent or Glu
  misc_feature (1401)..(1401): Absent or Asn
  misc_feature (1402)..(1402): Absent or Ile
  misc_feature (1403)..(1403): Absent or Thr
  misc_feature (1404)..(1404): Absent or Leu
  misc_feature (1405)..(1405): Absent or Asp
  misc_feature (1406)..(1406): Absent or Asp
  misc_feature (1407)..(1407): Absent or Leu
  misc_feature (1408)..(1408): Absent or Val
  misc_feature (1409)..(1409): Absent or Ile
  misc_feature (1410)..(1410): Absent or Asn
  misc_feature (1411)..(1411): Absent or Ser
  misc_feature (1412)..(1412): Absent or Gly
  misc_feature (1413)..(1413): Absent or Glu
  misc_feature (1414)..(1414): Absent or Thr
  misc_feature (1415)..(1415): Absent or Thr
  misc_feature (1416)..(1416): Absent or Val
  misc_feature (1417)..(1417): Absent or Val
  misc_feature (1418)..(1418): Absent or Asn
  misc_feature (1419)..(1419): Absent or Cys
  misc_feature (1420)..(1420): Absent or Ile
  misc_feature (1421)..(1421): Absent or Leu
  misc_feature (1422)..(1422): Absent or Arg
  misc_feature (1423)..(1423): Absent or Leu
  misc_feature (1424)..(1424): Absent or Gln
  misc_feature (1425)..(1425): Absent or Tyr
  misc_feature (1426)..(1426): Absent or Thr
  misc_feature (1427)..(1427): Absent or Pro
  misc_feature (1428)..(1428): Absent or Asp
  misc_feature (1429)..(1429): Absent or Glu
  misc_feature (1430)..(1430): Absent or Thr
  misc_feature (1431)..(1431): Absent or Val
  misc_feature (1432)..(1432): Absent or Ser
  misc_feature (1433)..(1433): Absent or Leu
  misc_feature (1434)..(1434): Absent or Asn
  misc_feature (1435)..(1435): Absent or Ser
  misc_feature (1436)..(1436): Absent or Pro
  misc_feature (1437)..(1437): Absent or Arg
  misc_feature (1438)..(1438): Absent or Asp
  misc_feature (1439)..(1439): Absent or Thr
  misc_feature (1440)..(1440): Absent or Ala
  misc_feature (1441)..(1441): Absent or Leu
  misc_feature (1442)..(1442): Absent or Lys
  misc_feature (1443)..(1443): Absent or Leu
  misc_feature (1444)..(1444): Absent or Phe
  misc_feature (1445)..(1445): Absent or Arg
  misc_feature (1446)..(1446): Absent or Asp
  misc_feature (1447)..(1447): Absent or Ile
  misc_feature (1448)..(1448): Absent or Asn
  misc_feature (1449)..(1449): Absent or Pro
  misc_feature (1450)..(1450): Absent or Asp
  misc_feature (1451)..(1451): Absent or Leu
  misc_feature (1452)..(1452): Absent or Phe
  misc_feature (1453)..(1453): Absent or Val
  misc_feature (1454)..(1454): Absent or Phe
  misc_feature (1455)..(1455): Absent or Ala
  misc_feature (1456)..(1456): Absent or Glu
  misc_feature (1457)..(1457): Absent or Ile
  misc_feature (1458)..(1458): Absent or Asn
  misc_feature (1459)..(1459): Absent or Gly
  misc_feature (1460)..(1460): Absent or Thr
  misc_feature (1461)..(1461): Absent or Tyr
  misc_feature (1462)..(1462): Absent or Asn
  misc_feature (1463)..(1463): Absent or Ser
  misc_feature (1464)..(1464): Absent or Pro
  misc_feature (1465)..(1465): Absent or Phe
  misc_feature (1466)..(1466): Absent or Phe
  misc_feature (1467)..(1467): Absent or Leu
  misc_feature (1468)..(1468): Absent or Thr
  misc_feature (1469)..(1469): Absent or Arg
  misc_feature (1470)..(1470): Absent or Phe
  misc_feature (1471)..(1471): Absent or Arg
  misc_feature (1472)..(1472): Absent or Glu
  misc_feature (1473)..(1473): Absent or Ala
  misc_feature (1474)..(1474): Absent or Leu
  misc_feature (1475)..(1475): Absent or Phe
  misc_feature (1476)..(1476): Absent or His
  misc_feature (1477)..(1477): Absent or Cys
  misc_feature (1478)..(1478): Absent or Ser
  misc_feature (1479)..(1479): Absent or Ser
  misc_feature (1480)..(1480): Absent or Leu
  misc_feature (1481)..(1481): Absent or Phe
  misc_feature (1482)..(1482): Absent or Asp
  misc_feature (1483)..(1483): Absent or Met
  misc_feature (1484)..(1484): Absent or Tyr
  misc_feature (1485)..(1485): Absent or Glu
  misc_feature (1486)..(1486): Absent or Thr
  misc_feature (1487)..(1487): Absent or Thr
  misc_feature (1488)..(1488): Absent or Leu
  misc_feature (1489)..(1489): Absent or Ser
  misc_feature (1490)..(1490): Absent or Glu
  misc_feature (1491)..(1491): Absent or Asp
  misc_feature (1492)..(1492): Absent or Asp
  misc_feature (1493)..(1493): Absent or Asn
  misc_feature (1494)..(1494): Absent or Cys
  misc_feature (1495)..(1495): Absent or Arg
  misc_feature (1496)..(1496): Absent or Thr
  misc_feature (1497)..(1497): Absent or Leu
  misc_feature (1498)..(1498): Absent or Val
  misc_feature (1499)..(1499): Absent or Glu
  misc_feature (1500)..(1500): Absent or Arg
  misc_feature (1501)..(1501): Absent or Glu
  misc_feature (1502)..(1502): Absent or Leu
  misc_feature (1503)..(1503): Absent or Ile
  misc_feature (1504)..(1504): Absent or Ile
  misc_feature (1505)..(1505): Absent or Arg
  misc_feature (1506)..(1506): Absent or Asp
  misc_feature (1507)..(1507): Absent or Ala
  misc_feature (1508)..(1508): Absent or Met
  misc_feature (1509)..(1509): Absent or Ser
  misc_feature (1510)..(1510): Absent or Val
  misc_feature (1511)..(1511): Absent or Ile
  misc_feature (1512)..(1512): Absent or Ala
  misc_feature (1513)..(1513): Absent or Cys
  misc_feature (1514)..(1514): Absent or Glu
  misc_feature (1515)..(1515): Absent or Gly
  misc_feature (1516)..(1516): Absent or Ser
  misc_feature (1517)..(1517): Absent or Glu
  misc_feature (1518)..(1518): Absent or Arg
  misc_feature (1519)..(1519): Absent or Phe
  misc_feature (1520)..(1520): Absent or Ala
  misc_feature (1521)..(1521): Absent or Arg
  misc_feature (1522)..(1522): Absent or Pro
  misc_feature (1523)..(1523): Absent or Glu
  misc_feature (1524)..(1524): Absent or Thr
  misc_feature (1525)..(1525): Absent or Tyr
  misc_feature (1526)..(1526): Absent or Lys
  misc_feature (1527)..(1527): Absent or Gln
  misc_feature (1528)..(1528): Absent or Trp
  misc_feature (1529)..(1529): Absent or Gln
  misc_feature (1530)..(1530): Absent or Val
  misc_feature (1531)..(1531): Absent or Arg
  misc_feature (1532)..(1532): Absent or Ile
  misc_feature (1533)..(1533): Absent or Leu
  misc_feature (1534)..(1534): Absent or Arg
  misc_feature (1535)..(1535): Absent or Ala
  misc_feature (1536)..(1536): Absent or Gly
  misc_feature (1537)..(1537): Absent or Phe
  misc_feature (1538)..(1538): Absent or Arg
  misc_feature (1539)..(1539): Absent or Pro
  misc_feature (1540)..(1540): Absent or Ala
  misc_feature (1541)..(1541): Absent or Lys
  misc_feature (1542)..(1542): Absent or Leu
  misc_feature (1543)..(1543): Absent or Ser
  misc_feature (1544)..(1544): Absent or Lys
  misc_feature (1545)..(1545): Absent or Gln
  misc_feature (1546)..(1546): Absent or Ile
  misc_feature (1547)..(1547): Absent or Val
  misc_feature (1548)..(1548): Absent or Lys
  misc_feature (1549)..(1549): Absent or Asp
  misc_feature (1550)..(1550): Absent or Gly
  misc_feature (1551)..(1551): Absent or Lys
  misc_feature (1552)..(1552): Absent or Glu
  misc_feature (1553)..(1553): Absent or Ile
  misc_feature (1554)..(1554): Absent or Val
  misc_feature (1555)..(1555): Absent or Lys
  misc_feature (1556)..(1556): Absent or Glu
  misc_feature (1557)..(1557): Absent or Arg
  misc_feature (1558)..(1558): Absent or Tyr
  misc_feature (1559)..(1559): Absent or His
  misc_feature (1560)..(1560): Absent or Lys
  misc_feature (1561)..(1561): Absent or Asp
  misc_feature (1562)..(1562): Absent or Phe
  misc_feature (1563)..(1563): Absent or Val
  misc_feature (1564)..(1564): Absent or Ile
  misc_feature (1565)..(1565): Absent or Asp
  misc_feature (1566)..(1566): Absent or Asn
  misc_feature (1567)..(1567): Absent or Asp
  misc_feature (1568)..(1568): Absent or Asn
  misc_feature (1569)..(1569): Absent or His
  misc_feature (1570)..(1570): Absent or Trp
  misc_feature (1571)..(1571): Absent or Met
  misc_feature (1572)..(1572): Absent or Phe
  misc_feature (1573)..(1573): Absent or Gln
  misc_feature (1574)..(1574): Absent or Gly
  misc_feature (1575)..(1575): Absent or Trp
  misc_feature (1576)..(1576): Absent or Lys
  misc_feature (1577)..(1577): Absent or Gly
  misc_feature (1578)..(1578): Absent or Arg
  misc_feature (1579)..(1579): Absent or Val
  misc_feature (1580)..(1580): Absent or Leu
  misc_feature (1581)..(1581): Absent or Tyr
  misc_feature (1582)..(1582): Absent or Ala
  misc_feature (1583)..(1583): Absent or Val
  misc_feature (1584)..(1584): Absent or Ser
  misc_feature (1585)..(1585): Absent or Cys
  misc_feature (1586)..(1586): Absent or Trp
  misc_feature (1587)..(1587): Absent or Lys
  misc_feature (1588)..(1588): Absent or Pro
  misc_feature (1589)..(1589): Absent or Ala
  misc_feature (1590)..(1590): Absent or Lys
  misc_feature (1591)..(1591): Absent or Lys
  unsure (1)..(1591): unsure at all Xaa locations
XXXXXXXXXXXXXXXXXXXXXXXXXXXXXXXXXXXXXXXXXXXXXXXXXXXXXXXXXXXXXXXXXXXXXXXXXXXXXXXXXXXXXXXXXXXXXXXXXXXXXXXXXXXXXXXXXXXXXXXXXXXXXXXXXXXXXXXXXXXXXXXXXXXXXXXXXXXXXXXXXXXXXXXXXXXXXXXXXXXXXXXXXXXXXXXXXXXXXXXXXXXXXXXXXXXXXXXXXXXXXXXXXXXXXXXXXXXXXXXXXXXXXXXXXXXXXXXXXXXXXXXXXXXXXXXXXXXXXXXXXXXXXXXXXXXXXXXXXXXXXXXXXXXXXXXXXXXXXXXXXXXXXXXXXXXXXXXXXXXXXXXXXXXXXXXXXXXXXXXXXXXXXXXXXXXXXXXXXXXXXXXXXXXXXXXXXXXXXXXXXXXXXXXXXXXXXXXXXXXXXXXXXXXXXXXXXXXXXXXXXXXXXXXXXXXXXXXXKXRXXXXXXXXXXXXXXXXXXXXXXXXXXXXXXXXXXXXXXXXXXXXXXXXXXXXXXXXXXXXXXXXXXXXXVKXXIKSXXXPELXXEXPXXATXGXLKXXXXXXXXXXXXXXXXXXXXXXXXXXXXXXXXXXXXXVXEAVXXXLXXGXXXGXXXXGKKVRDDXXTLXQXXGIXXXXXXXXXLDXXLGFXLEPXXXXXXXXXXXXXXXXXXXXXXXXXXXXXXXXXXXXXXXXXXXXXXXXXXXXXXXXXXXXXXXXXXXXXXXXXXXXXXXXXXXXXXXXXXXXXXXXXXXSXAXXXVXXXXXXXXXXXPXXXXXXXXXXXXXXXQRRXRRPFSVXEVEALVXAVEXLGTGXXXXXXXXRWRDVKXXAFXXAXHRXXXXXTYVDLKXXXXXXXXXXXXXXXXXXXXXXXXXXXXXXXXXXXXXXXXXXXXXXXXXXXXXXXXXXXXXXXXXXXXXXXXXXXXXXXXXXXXXXXDKWKTLVHTAXISPQQRRGEPVPQELLDRVLXAHXYWSQXQXXXXXXXXXXXXXXXXXXXXXXXXXXXXXXXXXXXXXXXXXXXXXXXXXXXXXXXXXXXXXXXXXXXXXXXXXXXXXXXXXXXXXXXXXXXXXXXXXXXXXXXXXXXXXXXXXXXXXXXXXXXXXXXXXXXXXXXXXXXXXXXXXXXXXXXXXXXXXXXXXXXXXXXXXXXXXXXXXXXXXXXXXXXXXXXXXXXXXXXXXXXXXXXXXXXXXXXXXXXXXXXXXXXXXXXXXXXXXXXXXXXXXXXXXXXXXXXXXXXXXXXXXXXXXXXXXXXXXXXXXXXXXXXXXXXXXXXXXXXXXXXXXXXXXXXXXXXXXXXXXXXXXXXXXXXXXXXXXXXXXXXXXXXXXXXXXXXXXXXXXXXXXXXXXXXXXXXXXXXXXXXXXXXXXXXXXXXXXXXXXXXXXXXXXXXXXXXXXXXXXXXXXXXXXXXXXXXXXXXXXXXXXXXXXXXXXXXXXXXXXXXXXXXXXXXXXXXXXXXXXXXXXXXXXXXXXXXXXXXXXXXXXXXXXXXXXXXXXXXXXXXXXXXXXXXXXXXXXXXXXXXXXXXXXXXXXXXXXXXXXXXXXXXXXXXXXXXXXXXXXXXXXXXXXXXXXXXXXXXXXXXXXXXXXXXXXXXXXXXX

SEQ ID NO: 36460 - protein, 785 aa, Artificial sequence
  consensus sequence of seq id no: 405  and its homologs
  misc_feature (1)..(1): Absent or Met
  misc_feature (2)..(2): Absent or Arg
  misc_feature (3)..(3): Absent or Ala
  misc_feature (4)..(4): Absent or Ala
  misc_feature (5)..(5): Absent or Val
  misc_feature (6)..(6): Absent or Gly
  misc_feature (7)..(7): Absent or Arg or Met
  misc_feature (8)..(8): Absent or Asp or Ala
  misc_feature (9)..(9): Absent or Ala or Ile
  misc_feature (10)..(10): Absent or Leu
  misc_feature (11)..(11): Absent or Ala or Phe
  misc_feature (12)..(12): Absent or Ala or Ser
  misc_feature (13)..(13): Absent or Gly or Thr
  misc_feature (14)..(14): Absent or Ala or Ile
  misc_feature (15)..(15): Absent or Ala
  misc_feature (16)..(16): Absent or Val or Leu
  misc_feature (17)..(17): Absent or Ala or Pro
  misc_feature (18)..(18): Absent or Ser
  misc_feature (19)..(19): Absent or Pro or Thr
  misc_feature (20)..(20): Absent or Cys or Asn
  misc_feature (21)..(21): Absent or Ser or Val
  misc_feature (22)..(22): Absent or Thr
  misc_feature (23)..(23): Absent or Ser
  misc_feature (24)..(24): Absent or Gly or Lys
  misc_feature (25)..(25): Absent or Arg or Leu
  misc_feature (26)..(26): Absent or Ala or Ser
  misc_feature (27)..(27): Absent or Met or Ala or Ile
  misc_feature (28)..(28): Absent or Ala or Leu
  misc_feature (29)..(29): Absent or Val or Pro or Leu or Asn
  misc_feature (30)..(30): Absent or Ala or Lys or Arg or Asn
  misc_feature (31)..(31): Absent or Ser or Leu or Pro or Thr
  misc_feature (32)..(32): Absent or Thr or Leu or Ser
  misc_feature (33)..(33): Absent or Gln or Ala or Val or His
  misc_feature (34)..(34): Absent or Arg or Leu or Val or Ser
  misc_feature (35)..(35): Absent or Gly or Ser or Ala or His
  misc_feature (36)..(36): Absent or Leu or Ser or Ala
  misc_feature (37)..(37): Absent or Ile or Leu or Ala
  misc_feature (38)..(38): Absent or Leu or Ser or Pro or Arg
  misc_feature (39)..(39): Absent or Arg or Ser or Gly or His
  misc_feature (40)..(40): Absent or Pro or Ile or Phe
  misc_feature (41)..(41): Absent or Pro or Ser or Arg
  misc_feature (42)..(42): Absent or Tyr or Pro or Gly
  misc_feature (43)..(43): Absent or Ser or Phe or Gln or Asn
  misc_feature (44)..(44): Absent or Arg or Met or Ala or Thr
  misc_feature (45)..(45): Absent or Ser or Ala or Leu or Thr
  misc_feature (46)..(46): Absent or Pro or Ser or Leu or Gly or Lys
  misc_feature (47)..(47): Absent or Ser or Ala or Pro or Lys or Asn or Arg
  misc_feature (48)..(48): Absent or Tyr or Cys or His or Pro or Thr or Ser or Ala or Phe
  misc_feature (49)..(49): Absent or His or Pro or Leu or Ala
  misc_feature (50)..(50): Absent or Ser or Arg or Pro or Thr or Val or Ala or Lys
  misc_feature (51)..(51): Absent or Pro or Ser or Ala
  misc_feature (52)..(52): Absent or Thr or Ile or Val or Ala or Ser
  misc_feature (53)..(53): Absent or Phe or Thr or Val or Ser
  misc_feature (54)..(54): Absent or Pro or Leu or Phe
  misc_feature (55)..(55): Absent or Thr or Ser or Phe or Asn or Pro
  misc_feature (56)..(56): Absent or Ala or Phe or Pro or Ser
  misc_feature (57)..(57): Absent or Leu or Pro or Val or Thr or Ser
  misc_feature (58)..(58): Absent or Arg or Lys or Ser or Leu or Pro
  misc_feature (59)..(59): Absent or Phe or Ser or Leu or Arg
  misc_feature (60)..(60): Absent or Pro or Lys or Arg
  misc_feature (61)..(61): Absent or His or Ser or Tyr or Leu or Asn or Phe
  misc_feature (62)..(62): Absent or Pro or Met or Ser or Asn or Thr or Leu or Ile
  misc_feature (63)..(63): Absent or Ser or Pro or Ala or Leu or Thr
  misc_feature (64)..(64): Absent or Ser or Leu or Ala or Thr or Gly or Phe
  misc_feature (65)..(65): Absent or Leu or Ala or Pro or Asn or His or Tyr or Arg
  misc_feature (66)..(66): Absent or Glu or Val or His or Pro or Phe or Ser or Arg
  misc_feature (67)..(67): Absent or Thr or Pro or Leu or Asn or Glu or Ser or Lys
  misc_feature (68)..(68): Absent or Ser or Gly or Pro or Leu or Thr or Asn
  misc_feature (69)..(69): Absent or Phe or Lys or Ser or Asn
  misc_feature (70)..(70): Absent or Phe or His or Leu or Pro
  misc_feature (71)..(71): Absent or Ala or His or Ser or Leu or Asn or Thr
  misc_feature (72)..(72): Absent or Gln or Pro or Phe or Lys or Ser or Arg or Ile or Val or Cys
  misc_feature (73)..(73): Absent or Gln or Ser or Pro or Arg or Thr or Phe or Ile
  misc_feature (74)..(74): Absent or Tyr or Ala or Lys or Leu or Asn or Pro
  misc_feature (75)..(75): Absent or Ser or Thr or Leu or Pro or Phe or Arg
  misc_feature (76)..(76): Absent or Leu or Ala or Phe or Pro or Arg or His or Ser or Asn or Cys or Thr
  misc_feature (77)..(77): Absent or Lys or Thr or Pro or Leu or Tyr
  misc_feature (78)..(78): Absent or Tyr or Ala or Pro or Ser or Thr or Arg
  misc_feature (79)..(79): Absent or Ser or Pro or Leu or Thr or Lys or Cys or Gln or Arg
  misc_feature (80)..(80): Absent or Ser or Leu or Pro or Thr or Gln or Asp
  misc_feature (81)..(81): Absent or Leu or Ser or Pro or Ile or Asn or Arg
  misc_feature (82)..(82): Absent or His or Leu or Pro or Lys or Ser or Phe or Val or Gln or Arg
  misc_feature (83)..(83): Absent or Pro or Ser or Leu or Lys or Thr or Cys or Ile or Phe or Ala or Asn
  misc_feature (84)..(84): Absent or Lys or Thr or Pro or His or Gln or Leu or Glu or Ser
  misc_feature (85)..(85): Absent or Thr or Arg or Pro or Gln or Ala or Ser or Cys or Phe or Leu
  misc_feature (86)..(86): Absent or Val or Ala or His or Leu or Gln or Thr or Lys or Pro or Ile
  misc_feature (87)..(87): Absent or Asn or Arg or Ala or Gln or Ser
  misc_feature (88)..(88): Absent or Ser or Ala or His or Pro or Thr or Asn or Arg
  misc_feature (89)..(89): Absent or Arg or Ala or Asn or Ser or Gln or Glu
  misc_feature (90)..(90): Absent or Arg or Pro or Thr or Leu or Gln or Ser or Lys or Glu or Trp
  misc_feature (91)..(91): Absent or Pro or Ser or Ala or Lys or Thr or Gln
  misc_feature (92)..(92): Absent or Arg or Ser or Leu or Ala or Pro
  misc_feature (93)..(93): Absent or Cys or Ala or Phe or Pro or Val or Thr or Ile
  misc_feature (94)..(94): Absent or Leu or Pro or Val or Ala or Ser
  misc_feature (95)..(95): Absent or Asn or Ser or Ala or Pro or Asp or Thr
  misc_feature (96)..(96): Absent or Ser or Pro or Ala or Gly or Thr
  misc_feature (97)..(97): Absent or Ser or Ala or Arg or Thr or Gln or His
  misc_feature (98)..(98): Absent or Thr or Pro or Ala or Ser or Leu or His
  misc_feature (99)..(99): Absent or Glu or Pro or Ala or Val or Asp or Ser or Thr or Arg
  misc_feature (100)..(100): Absent or Thr or Pro or Ser or Leu or Val
  misc_feature (101)..(101): Absent or Ala or Ser or Pro or Thr or Tyr or Val
  misc_feature (102)..(102): Absent or Asn or Pro or Ala or Arg or Ile or Glu or Val or Leu
  misc_feature (103)..(103): Met or Absent or Lys or Pro or Ala or Ser or Thr
  misc_feature (104)..(104): Leu or Absent or Gly or Ala or Pro or Glu or Asp
  misc_feature (105)..(105): Ala or Absent or Ser or Asp or Pro or Thr or Gln or Arg
  misc_feature (106)..(106): Arg or Absent or Lys or Gly or Asp or Pro or Ser or Glu
  misc_feature (107)..(107): Thr or Absent or Ile or Val or Gly or Glu
  misc_feature (108)..(108): Ser or Absent or Lys or Gly or Ala or Leu or Thr or Tyr or Phe or Arg
  misc_feature (109)..(109): Thr or Absent or Glu or Pro or Gly or Ala or Asp
  misc_feature (110)..(110): Arg or Absent or Asp or Ala or Pro or Gly or Glu
  misc_feature (111)..(111): Ala or Absent or Pro or Gly or Asp
  misc_feature (112)..(112): Ser or Absent or Gly or Ala or Glu
  misc_feature (113)..(113): Thr or Absent or Glu or Pro or Ala
  misc_feature (114)..(114): Ala or Absent or Leu or Thr or Pro or Val
  misc_feature (115)..(115): Arg or Absent or Asp or Thr or Pro or Ser or Ala or Gly
  misc_feature (116)..(116): Ala or Absent or Leu or Gly or Arg or Ser or Pro or Asp
  misc_feature (117)..(117): Arg or Absent or Gly or Asp or Ile
  misc_feature (118)..(118): Ala or Absent or Pro or Val or Asp or Gly or Glu or Cys
  misc_feature (119)..(119): Arg or Absent or Ser or Tyr or Asp or Leu or Gln or Ile or Lys or Ala or Pro
  misc_feature (120)..(120): Ser or Absent or Ala or Leu or Phe or Arg or Tyr or Gly
  misc_feature (121)..(121): Ser or Absent or Lys or Gly or Leu or Phe or Cys
  misc_feature (122)..(122): Arg or Absent or Ser or Gly or Leu or Glu or Gln
  misc_feature (123)..(123): Ser or Absent or Arg or Gln or Gly or His or Asn or Ile
  misc_feature (124)..(124): Ser or Absent or Gly or Leu or Gln or Thr or His or Pro or Phe
  misc_feature (125)..(125): Asn or Absent or Gln or Ala or Leu or Lys or Arg or Met
  misc_feature (126)..(126): Ala or Absent or Ile or Leu or Ser or Gln
  misc_feature (127)..(127): Gly or Absent or Phe or Ala or Thr or Val or His or Ser or Asp
  misc_feature (128)..(128): Ala or Absent or Leu or Glu or Gln or Ser or Asn
  misc_feature (129)..(129): Arg or Absent or Glu or Thr or Ala or Asp or Ser
  misc_feature (130)..(130): Ala or Absent or Asn or Pro or Ser or Gln
  misc_feature (131)..(131): Pro or Absent or Ala or Gly or Glu or Lys or Ser or Asn
  misc_feature (132)..(132): Gly or Absent or Leu or Ala or Arg or Val or Thr
  misc_feature (133)..(133): Glu or Absent or Asp or Arg or Val or Ile or Pro
  misc_feature (134)..(134): Arg or Absent or Lys or Ala or Leu or Val or Phe or Met or Ser or Gly
  misc_feature (135)..(135): Ala or Absent or His or Arg or Leu or Asn or Lys or Phe
  misc_feature (136)..(136): Ala or Absent or Asp or Pro or Tyr
  misc_feature (137)..(137): Arg or Absent or Ser or Pro or Asp or Glu or Ala or Thr or Gln
  misc_feature (138)..(138): Arg or Absent or Ala or Glu or Asp or Asn or Val or Ile or Thr or Leu or Gln
  misc_feature (139)..(139): His or Absent or Gln or Glu or Ala or Asp or Lys or Asn or Ser
  misc_feature (140)..(140): Arg or Lys or Ser or Asp or Absent or Ala or Met or Glu
  misc_feature (141)..(141): Ala or Lys or Asn or Absent or Arg or Glu or Ser or Val
  misc_feature (142)..(142): Arg or Glu or Thr or Absent or Lys or Ser
  misc_feature (143)..(143): Thr or Arg or Lys or Absent or Met or Ala or Ile
  misc_feature (144)..(144): Arg or Lys or Glu or Absent or Asn or Gln or Thr
  misc_feature (145)..(145): Ala or Lys or Arg or Absent or Glu or Leu or Thr
  misc_feature (146)..(146): Ser or Lys or Arg or Absent or Val or Leu or Phe or Glu or Met
  misc_feature (147)..(147): Asn or Arg or Lys or Absent or Glu or Val or Gly or Ser or Ile or Thr
  misc_feature (148)..(148): Asp or Glu or Lys or Absent or Phe or Arg or Thr
  misc_feature (149)..(149): Pro or Lys or Glu or Absent or Arg or Ser or Asp or Ile or Met or Asn or Gln
  misc_feature (150)..(150): Ala or Leu or Lys or Absent or Arg or Gly or Asn or Tyr or Ile or Gln or Asp or Glu or Thr
  misc_feature (151)..(151): Ala or Lys or Arg or Absent or Ser or Ile or Leu or Tyr or Met or Glu or Asp
  misc_feature (152)..(152): Thr or Ala or Lys or Absent or Leu or Trp or Phe or Ile or Arg or Glu or Met or Val
  misc_feature (153)..(153): Thr or Phe or Val or Ala or Absent or Ser or Leu or Lys or Met or Gly or Gln or Asn
  misc_feature (154)..(154): Ala or Val or Pro or Leu or Absent or Arg or Ile or Asp or Thr or Asn or Gly or Glu or Gln or Met or Lys
  misc_feature (155)..(155): Thr or Ser or Glu or Ala or Absent or Lys or Arg or Asn or Val or Gly or Asp or Met or Gln or Ile
  misc_feature (156)..(156): Ala or Arg or Met or Lys or Absent or Pro or Ser or Thr or Asn or Asp or Leu or Glu or His or X or Gln
  misc_feature (157)..(157): Arg or Ser or Lys or Absent or Pro or Thr or Glu or Ile or Asn or Met or Val or Asp or Gln
  misc_feature (158)..(158): Glu or Asp or Thr or Absent or Gly or Ser or Ala or Met or Leu or Arg or Pro or Asn
  misc_feature (159)..(159): Arg or Glu or Pro or Absent or Leu or Ala or Val or Thr or Asp or Asn or Tyr or Met or Ile or Gln or Lys or Gly
  misc_feature (160)..(160): Ala or Pro or Ser or Absent or Val or Met or Lys or Gly or Leu or Trp or Ile
  misc_feature (161)..(161): Arg or Cys or Val or Gly or Absent or Ser or Ala or Lys or His or Glu or Ile or Asn or Phe or Tyr or Leu
  misc_feature (163)..(163): Tyr or Ala or Absent or Pro or Val or Cys or Glu or Lys or Ser or Ile or Leu or Gln or Thr
  misc_feature (167)..(167): Val or Ala or Gly or Absent or Met or Ser or Ile
  misc_feature (168)..(168): Gly or Val or Pro or Cys or Absent or Asn or Glu or Arg or Ile or Phe or Leu or Ser or Ala or Lys or Thr or Gln
  misc_feature (169)..(169): Val or Leu or Gly or Absent or Met or Ile or Asp or Lys
  misc_feature (171)..(171): Thr or Ser or Pro or Absent or Phe or Asn or Arg or Glu or Asp or Val
  misc_feature (172)..(172): Arg or Ser or Val or Leu or Absent or Ala or Glu or Thr or Gln or Lys or Ile or Asp
  misc_feature (173)..(173): Ser or Thr or Glu or His or Absent or Asp or Ile or Asn or Ala or Arg
  misc_feature (174)..(174): Asn or Ala or Val or Thr or Absent or Glu or Gln or Pro or Lys or Trp
  misc_feature (175)..(175): Asp or Glu or Gly or Absent or Ala or Gln or Lys or Asn or Thr or Phe or Ser or His
  misc_feature (176)..(176): Val or Ala or Gly or Glu or Absent or Ser or Gln or Lys or Leu or Ile or Asp or Met or Asn
  misc_feature (177)..(177): Absent or Pro or Glu or Gly
  misc_feature (178)..(178): Absent or Gly or Tyr
  misc_feature (179)..(179): Ala or Pro or Glu or Absent or Gln or Tyr or Thr or Leu or Val or Ser or Ile
  misc_feature (181)..(181): Tyr or Phe or Ser or Absent or Ile or Glu or Lys
  misc_feature (182)..(182): Val or Leu or Pro or Absent or Ile or Thr or Ala
  misc_feature (183)..(183): Asp or Ser or Thr or Gly or Absent or His or Gln or Val or Pro or Glu or Asn or Ile
  misc_feature (184)..(184): Val or Leu or His or Absent or Pro or Gln or Arg or Ala or Glu or Thr or Lys or Asp or Ser or Met or Asn
  misc_feature (185)..(185): Ala or Asp or Glu or Val or Absent or Met or Arg or Thr or Leu or Pro or His or Ser or Gly
  misc_feature (186)..(186): Thr or Ile or Glu or Absent or Arg or Ala or Leu or Lys
  misc_feature (187)..(187): Tyr or Phe or Pro or Absent or Cys
  misc_feature (188)..(188): Glu or Ala or Absent or Gln or Asp
  misc_feature (189)..(189): Arg or Val or Leu or Thr or Absent or Gln or Lys or Phe or Asn or His
  misc_feature (190)..(190): Lys or Tyr or Absent or Arg or Pro or Glu or Gly or Asn or Ser or Ala or Val
  misc_feature (191)..(191): Ala or Lys or Asp or Absent or Val or Leu or Ile or Pro or Glu or Met or Phe
  misc_feature (192)..(192): Thr or Lys or Leu or Absent or Arg or Glu or Asn or Phe or Asp or Met or Val or Gln
  misc_feature (193)..(193): His or Lys or Absent or Arg or Glu or Thr or Asn or Gly
  misc_feature (194)..(194): Gly or His or Arg or Lys or Absent or Asp or Ala or Ser
  misc_feature (195)..(195): Gln or Arg or Absent or Pro or Asp or Glu or Ala or Lys or Leu
  misc_feature (196)..(196): Trp or Leu or His or Absent or Asp or Lys or Arg or Glu
  misc_feature (197)..(197): Asp or Gly or Arg or Asn or Absent or Ala or Val or Glu or Ser
  misc_feature (198)..(198): Absent or Asp or Glu
  misc_feature (199)..(199): Absent or Glu or Leu or Ser or Gly or Lys or Ala
  misc_feature (200)..(200): Absent or Asp or Ile or Leu or Met or Glu or Ser or Lys
  misc_feature (201)..(201): Absent or Gly or Ser or Glu or Ala
  misc_feature (202)..(202): Absent or Phe or Glu
  misc_feature (203)..(203): Absent or Gly or Thr or Arg
  misc_feature (204)..(204): Absent or Arg or His or Asp
  misc_feature (205)..(205): Absent or Ala or Gln
  misc_feature (206)..(206): Absent or Gly or Met
  misc_feature (207)..(207): Absent or Arg or Val or Glu
  misc_feature (208)..(208): Absent or Gly or Ala
  misc_feature (209)..(209): Absent or Arg or Tyr or Val
  misc_feature (210)..(210): Absent or Gly or Gln
  misc_feature (211)..(211): Absent or Gly or Asn or Ala
  misc_feature (212)..(212): Absent or Ala or Val or Gly
  misc_feature (213)..(213): Absent or Gly or Thr or Asp
  misc_feature (214)..(214): Absent or Ala or Glu
  misc_feature (215)..(215): Absent or Gly or Glu
  misc_feature (216)..(216): Absent or Ala or Val or Ser
  misc_feature (217)..(217): Absent or Glu or Leu
  misc_feature (218)..(218): Absent or Ala or Glu
  misc_feature (219)..(219): Absent or Gly or Arg
  misc_feature (220)..(220): Absent or Gly or Ala
  misc_feature (221)..(221): Absent or Glu or Lys
  misc_feature (222)..(222): Absent or Leu or Lys
  misc_feature (223)..(223): Absent or Gly or Lys
  misc_feature (224)..(224): Absent or Glu or Lys
  misc_feature (225)..(225): Absent or Leu or Val
  misc_feature (226)..(226): Absent or Met or Ser
  misc_feature (227)..(227): Absent or Lys
  misc_feature (228)..(228): Absent or Ala
  misc_feature (229)..(229): Absent or Ala or Glu
  misc_feature (230)..(230): Absent or Arg or Lys
  misc_feature (231)..(231): Absent or Gln or Lys
  misc_feature (232)..(232): Absent or Glu or Arg
  misc_feature (233)..(233): Absent or Met
  misc_feature (234)..(234): Absent or Asp or Ala
  misc_feature (235)..(235): Absent or Ala or Arg
  misc_feature (236)..(236): Absent or Asp or Glu
  misc_feature (237)..(237): Absent or Ala
  misc_feature (238)..(238): Absent or Glu
  misc_feature (239)..(239): Absent or Ala or Lys
  misc_feature (240)..(240): Absent or Asp or Val
  misc_feature (241)..(241): Absent or Ala or Lys
  misc_feature (242)..(242): Absent or Tyr or Glu
  misc_feature (243)..(243): Absent or Asp or Glu
  misc_feature (244)..(244): Absent or Asp or Val
  misc_feature (245)..(245): Absent or Val or Thr
  misc_feature (246)..(246): Absent or Gly
  misc_feature (247)..(247): Absent or Leu
  misc_feature (248)..(248): Absent or Val
  misc_feature (249)..(249): Absent or Arg
  misc_feature (250)..(250): Absent or Ala or Ser
  misc_feature (251)..(251): Absent or Asp or Ile
  misc_feature (252)..(252): Absent or Glu or Lys
  misc_feature (253)..(253): Absent or Glu or Asn or Asp or Ser or Thr or Ala
  misc_feature (254)..(254): Absent or Ser or Lys or Glu or Pro or Asp or Thr or Asn or Gly or Arg or Gln
  misc_feature (255)..(255): Met or Thr or Ser or Gln or Absent or Lys or Glu or Asp or Ile or Val or Asn
  misc_feature (256)..(256): Met or Val or Leu or Absent or Ile or Gly or Asn or Asp or Glu or Ala
  misc_feature (257)..(257): Leu or Lys or Absent or Ala or Ile or Val or Tyr or Phe
  misc_feature (259)..(259): Ala or Gly or Val or Absent or X or Arg or Ser or Gln or Tyr or Leu or Lys
  misc_feature (262)..(262): Ala or Gln or Arg or Gly or Absent or Lys or X or Tyr or Phe or His
  misc_feature (263)..(263): Lys or Leu or Arg or Absent or Gln or Ser
  misc_feature (265)..(265): Ser or Lys or Absent or X or Tyr or Arg or Ile or Thr or Gln
  misc_feature (267)..(267): Gly or Leu or Absent or Tyr or Ser
  misc_feature (268)..(268): Ala or His or Ser or Absent or Gln or Lys or Gly or Asn
  misc_feature (269)..(269): Tyr or Met or His or Absent or Lys or Gln
  misc_feature (270)..(270): Val or Ile or Leu or Gly or Absent
  misc_feature (271)..(271): Asn or Pro or Thr or His or Absent or Lys
  misc_feature (272)..(272): Absent or X
  misc_feature (273)..(273): Ala or Met or Absent
  misc_feature (274)..(274): Val or Absent or Asn
  misc_feature (275)..(275): Glu or Ser or Gly or Thr or Absent or X or Ala or Lys or Gln or Tyr or Asp
  misc_feature (276)..(276): Gly or Ala or Absent or Trp or Leu or Tyr or Met or Val or Ile
  misc_feature (277)..(277): Gln or Asn or His or Val or Absent or Asp or Glu or Ala or Ser or Ile or Met or Thr
  misc_feature (278)..(278): Gly or Absent or X or Leu or Pro or Val or Glu or Lys or Thr or Asn or Asp
  misc_feature (279)..(279): Gly or Absent or Val or Ile or Asn or Thr or Tyr or Gln or Ser
  misc_feature (280)..(280): Val or Tyr or His or Absent or Ile or Gly or Glu or Lys or Ala or Leu or Ser or Asn or Pro or Asp or Gln
  misc_feature (281)..(281): Lys or Gly or Ser or Absent or Pro or Leu or His or Tyr or Met or Ile or Thr or Val or Glu
  misc_feature (282)..(282): Ala or Glu or Gly or Absent or Lys or Asp or Thr or Pro or Asn or Ser
  misc_feature (283)..(283): Ser or Gly or Tyr or Absent or X or Arg or Asp or Ala or Glu or Asn
  misc_feature (284)..(284): Pro or Lys or Absent or Glu or Trp or Phe or Ile or Gln or Asp or Ser or Ala
  misc_feature (285)..(285): Gly or Gln or Absent or Lys or His or Ile or Leu or Ser or Asp or Glu
  misc_feature (287)..(287): Ile or Val or Lys or Absent or Phe or Gly or Trp or Arg or Asp or Asn or Leu or Gln or Ala
  misc_feature (288)..(288): Thr or Ser or Gln or Absent or Asn or Lys or Arg or Ala or Leu or His
  misc_feature (289)..(289): Pro or Ser or Ala or Phe or Absent or Gln or Glu or Lys or Leu or Met or Ile
  misc_feature (290)..(290): Lys or Asp or Glu or Val or Absent or Met or Leu or Ile or Phe
  misc_feature (291)..(291): Glu or Gln or Ser or Absent or X or Lys or Met or Gly or Thr or Arg or Ala or Asp or His or Asn or Tyr
  misc_feature (292)..(292): Leu or Ala or Absent or Arg or Thr or Glu
  misc_feature (293)..(293): Arg or Glu or Absent or Lys
  misc_feature (294)..(294): Asp or Ala or Glu or Absent or X or Ile or Leu
  misc_feature (295)..(295): Gln or Lys or Leu or Absent or His or Met or Thr
  misc_feature (296)..(296): Leu or Arg or Absent or Asn or Ile or Val
  misc_feature (297)..(297): Lys or Thr or Ser or Glu or Absent or Pro or Gln or Asn
  misc_feature (298)..(298): Pro or His or Lys or Absent or Tyr or Arg or Glu or Ser or Ala or Thr or Gln or Asn or Gly
  misc_feature (299)..(299): Ile or Leu or Absent or Val or Tyr or Gly or Asp or Asn
  misc_feature (300)..(300): Arg or Ser or Absent or Leu or Lys or Asn or Tyr or Ala or His or Gly
  misc_feature (301)..(301): Glu or Tyr or His or Absent or Arg or Gly or Asp or Phe or Pro or Asn or Gln or Lys or Thr
  misc_feature (302)..(302): Lys or Glu or Asp or Leu or Absent or Gly or Arg or Ser or Asn or Thr or His or Ala
  misc_feature (303)..(303): Lys or Arg or Absent or Asp or Phe or Val or Ser or Asn or Gly or Glu
  misc_feature (304)..(304): Ala or His or Absent or Val or Cys or Glu or Lys or Thr or Leu or Trp or Ile or Gly or Ser
  misc_feature (306)..(306): Val or Ile or Lys or Absent or Tyr or Phe
  misc_feature (308)..(308): Lys or Leu or Absent or His or Trp or Ala or Cys or Met or Tyr or Asn
  misc_feature (309)..(309): Val or Leu or Ile or Absent
  misc_feature (310)..(310): Val or Absent or Ile or Phe or Leu
  misc_feature (312)..(312): Ala or Ile or Leu or Absent or Val or Met or Cys
  misc_feature (313)..(313): Thr or Val or Absent or Leu or Phe or Ile or Trp or Tyr
  misc_feature (316)..(316): His or Asn or Val or Absent or Ser or Glu or Asp or Phe or Tyr or Thr
  misc_feature (319)..(319): Phe or Asn or Absent or Trp or Tyr or Leu or Ile or Arg or Ala or Val
  misc_feature (320)..(320): Leu or Gly or Absent or Ile or Arg or Asp or Pro or Glu or Val
  misc_feature (321)..(321): Lys or Thr or Ala or Ser or Absent or Pro or Glu or Val or Arg or Asn or Asp or Leu
  misc_feature (322)..(322): Lys or Arg or Phe or Absent or His or Asn or Asp or Glu or Ala or Thr or Ser or Gly
  misc_feature (323)..(323): Val or Leu or Absent or Ile or Ala
  misc_feature (324)..(324): Arg or Ala or Absent or Leu or Val or Trp or Lys or Glu or Gln or Pro or His or Ser or Asn
  misc_feature (325)..(325): Asp or Arg or Absent or Gly or Asn or Lys or Glu or Gln
  misc_feature (326)..(326): Val or Leu or Ile or Absent or Phe or Met or Ser or Tyr or Ala
  misc_feature (327)..(327): Val or Arg or Absent or Ala or Leu or Gln or Ile or Thr
  misc_feature (328)..(328): Gly or Asp or Absent or Glu or Arg or Leu or Phe or Asn or Gln or Lys or Ala or Ser
  misc_feature (329)..(329): Absent or Pro or Lys or Asn or Arg or Asp
  misc_feature (330)..(330): Absent or Pro or Ala
  misc_feature (331)..(331): Absent or Leu
  misc_feature (332)..(332): Absent or Gly or Glu
  misc_feature (333)..(333): Absent or Val or Gly
  misc_feature (334)..(334): Absent or Thr or Met or Arg
  misc_feature (335)..(335): Absent or Ser or Gln
  misc_feature (336)..(336): Absent or Glu or Gly
  misc_feature (337)..(337): Absent or Ala or Asn
  misc_feature (338)..(338): Absent or Ala or Thr
  misc_feature (339)..(339): Absent or Ala or Lys
  misc_feature (340)..(340): Absent or Pro or Lys
  misc_feature (341)..(341): Absent or Glu or Gly
  misc_feature (342)..(342): Absent or Asp or Lys
  misc_feature (343)..(343): Absent or Leu or Lys
  misc_feature (344)..(344): Gly or Ser or Ala or Phe or Absent or Cys or Glu or Lys or Leu or Val or Asn or Tyr or Asp
  misc_feature (346)..(346): Pro or Gly or Absent or Arg or Asp or Ser or Lys or Ile or Val or Glu
  misc_feature (347)..(347): Ile or Ala or Absent or Leu or Val or Ser or Thr or Phe or Tyr
  misc_feature (348)..(348): Val or Ile or Asn or Absent or Trp or Met or Phe or Leu
  misc_feature (351)..(351): Val or Ala or Absent or Ile or Gly or Asn
  misc_feature (352)..(352): Thr or Leu or Absent or Asn
  misc_feature (354)..(354): Ile or Val or Absent or Ala or Met or Leu or Phe or Arg or Gln or Lys or Glu
  misc_feature (356)..(356): Leu or Lys or Absent or Gly or Ile or Val
  misc_feature (359)..(359): Asn or Lys or Leu or Absent or Arg or Ser or Thr or Asp or Pro or Gln
  misc_feature (360)..(360): Ala or Gly or Leu or Absent or Asp or Gln or Glu or Arg or Ser or Asn
  misc_feature (361)..(361): Val or Thr or Pro or Absent or Leu or Lys or Ala or Tyr or Ile or Ser or Phe
  misc_feature (362)..(362): Asp or Arg or Absent or Ser or Phe or Thr or His or Asn or Lys
  misc_feature (363)..(363): His or Leu or Asp or Absent or Arg or Phe or Met or Pro or Val or Ser or Lys or Tyr or Gln or Glu or Thr
  misc_feature (364)..(364): Asp or Ala or Ser or Thr or Absent or Asn or Arg or Lys or Glu or His or Pro or Gly
  misc_feature (365)..(365): Ala or Val or Asp or Absent or Cys or Ser or Arg or Glu or Leu or Lys
  misc_feature (366)..(366): Leu or Val or Absent or Ile or Phe or Met
  misc_feature (367)..(367): Absent or X or Lys or Ala or Gln or Asp or Glu or Asn or Ile or Arg or Thr or Met or Leu or Val or Ser
  misc_feature (368)..(368): Glu or Gly or Asn or Absent or Ser or Gln or Arg or Thr or His or Asp or Ala
  misc_feature (369)..(369): Arg or Asp or Cys or Absent or Phe or Trp or Asn or Tyr
  misc_feature (370)..(370): Trp or Ile or Absent or Lys or Leu or Val or Met or X
  misc_feature (371)..(371): Val or Ile or Gly or Absent or Pro or Tyr or Lys or Arg or Thr or Asn or Gln or Met or Ala
  misc_feature (372)..(372): Ala or Ile or Val or Asp or Absent or Phe or Lys or Asn or Leu or His or Gln or Glu or Arg or Tyr or Thr
  misc_feature (373)..(373): Lys or Gln or Glu or Trp or Absent or Leu or Arg or Thr or Val or Ser or Met
  misc_feature (374)..(374): Glu or Ala or Val or Absent or Ser or Thr or Ile or Leu or Phe or Met
  misc_feature (375)..(375): Ala or Thr or Val or Absent or Ser or Lys or Arg or Ile or Glu or Asn or His or Tyr
  misc_feature (376)..(376): Glu or Ile or Met or Absent or Val or Thr or Ser or Ala or Gln or Asn or Lys or Asp or Arg
  misc_feature (377)..(377): Thr or Ala or Arg or Ser or Absent or Lys or Glu or Gly or His or Tyr or Leu or Asn or Met or Gln or Ile
  misc_feature (378)..(378): Arg or Lys or Val or Absent or Gly or Ser or Ala or Cys
  misc_feature (379)..(379): Arg or Lys or Val or Absent or Leu or Ile or Ala or Phe or Met
  misc_feature (380)..(380): Leu or Arg or Absent or Lys or Asp or Val or Pro or Ser or Ile or Phe or Tyr or Glu or Cys or Asn or Gln or His
  misc_feature (381)..(381): Thr or Asn or Lys or Absent or Ser or Arg or Pro or Asp or Ala or Val
  misc_feature (382)..(382): Absent or Lys
  misc_feature (383)..(383): Leu or Val or Lys or Absent or Glu or Pro or Ile or Ala
  misc_feature (384)..(384): Ala or Ile or Leu or Absent or Glu or Asp or Ser or Thr or Pro or Asn or Lys or Val
  misc_feature (385)..(385): Gly or Ser or Asn or Absent or Arg or Asp or Lys or Ala or Ile or Glu
  misc_feature (386)..(386): Ile or Val or Absent or Leu or Phe or Thr
  misc_feature (387)..(387): Ala or His or Leu or Absent or Arg or Phe or Tyr or Ile or Val or Lys or Cys or Met or Glu
  misc_feature (389)..(389): Val or Thr or Absent or Cys or Ser or Ile or Met
  misc_feature (391)..(391): Ser or Ala or Leu or Absent or Gly or Thr or Pro or Phe or Asp
  misc_feature (392)..(392): Arg or Lys or Thr or Absent or Glu or Ala or Val or His or Leu or Asn or Ser or Gly or Gln
  misc_feature (393)..(393): Arg or Ala or Ser or Absent or Met or Lys or Asn or Ile or Thr
  misc_feature (394)..(394): Gly or Ala or Leu or Ser or Absent or Lys or Asn or Asp or Pro or His
  misc_feature (395)..(395): Ser or Thr or Lys or Absent or Val or Gly or Ile or Asp or Gln or Tyr or Leu or Trp or Phe or Glu or His or Asn or Arg
  misc_feature (396)..(396): Gly or Ser or Absent or Thr or Val or Tyr or Asn or Glu or Asp or Ala or Gln
  misc_feature (397)..(397): Met or Ile or Phe or Leu or Absent or Val or Ser or Asn or Glu
  misc_feature (398)..(398): Arg or Ser or Val or Absent or Thr or Ala or Gly or Lys or Asn or Asp or Pro or Glu or Gln
  misc_feature (399)..(399): Glu or Gly or Absent or Ser or Asp or Asn or Lys or Leu or Ala or His
  misc_feature (400)..(400): Ala or Phe or Val or Ile or Absent or Arg or Leu or Met
  misc_feature (401)..(401): Val or Ser or Thr or Absent or Ile or Ala or Arg or Leu or Phe or Met or Trp or Asn or Lys
  misc_feature (402)..(402): Leu or Ala or Ser or Gly or Absent or Arg or Lys or Gln or Glu or Asp or Asn
  misc_feature (403)..(403): Gln or Leu or Glu or Val or Absent or X or Lys or Asp or Phe or Tyr or Ile or Ser or Thr or Ala or Arg or Met
  misc_feature (405)..(405): Met or Leu or Gln or Absent or His or Ala or Lys or Arg or Asn or Glu or Asp
  misc_feature (406)..(406): Arg or Gln or Absent or Lys or His or Asp or Ala or Asn or Thr or Tyr or Glu
  misc_feature (407)..(407): Glu or Gln or Absent or Leu or Phe or Ala or Met or Asn or Val or Ile or Tyr or His or Lys
  misc_feature (408)..(408): Arg or Lys or Absent or Pro or Thr or Tyr or Leu or Ala or Ser or Gly or Gln
  misc_feature (409)..(409): Asn or Gln or Lys or Absent or Ala or Asp or Pro or Gly or Thr or Glu or Arg or His
  misc_feature (410)..(410): Gly or Ala or Absent or Met or Asn or Lys or Asp or Tyr or Pro or Gln
  misc_feature (411)..(411): Arg or Absent or Leu or Gly or Lys or Ile or Gln or Asp or Glu
  misc_feature (413)..(413): Absent or Arg or Asn or Asp or Gln or Lys
  misc_feature (416)..(416): Val or Ile or Absent or Met or Leu or Ala or Phe
  misc_feature (417)..(417): Ile or Leu or Absent or Lys or Pro or Val or Phe
  misc_feature (419)..(419): Ala or Ser or Absent or Arg or Thr or Val or Lys or Cys
  misc_feature (420)..(420): Ala or Absent or X or Ile or Pro or Thr or Gln or Ser
  misc_feature (426)..(426): Ser or Ala or Absent or Val or Thr
  misc_feature (427)..(427): Phe or Absent or His or Trp or Leu or Val or Ile
  misc_feature (430)..(430): Ala or Thr or Absent or Val or Cys or Arg or Ser or Lys or Gln
  misc_feature (431)..(431): Ala or Leu or Met or Absent or Tyr or Ile or Phe or Val or X
  misc_feature (432)..(432): Met or Leu or Absent or Ala or Cys or Lys or Gly or Ile
  misc_feature (433)..(433): Glu or Arg or Lys or Absent or Ile or Asn or Ala or Gly or Gln or His or Asp
  misc_feature (434)..(434): Glu or Asp or Thr or Absent or Ala or Met
  misc_feature (435)..(435): Leu or Met or Absent or Ile
  misc_feature (436)..(436): Arg or Gly or Ala or Absent or Ser
  misc_feature (437)..(437): Ser or Glu or Leu or Tyr or Absent or Ile or Gln
  misc_feature (438)..(438): Ala or Arg or Lys or Absent or Asn
  misc_feature (439)..(439): Gly or Asp or Absent
  misc_feature (440)..(440): Asn or Pro or Phe or Absent
  misc_feature (441)..(441): Tyr or Ile or Val or Absent or Ala or Pro or Thr or Lys or Leu or Gln or Met or Arg or Glu or His or Ser or Asn
  misc_feature (442)..(442): Phe or Ala or Absent or Lys or His or Glu or Asn or Thr or Ser or Val or Met or Arg or Ile
  misc_feature (443)..(443): Ala or Absent or Ser or Glu or Ile or Gly or Thr
  misc_feature (444)..(444): Pro or Ala or Absent or Thr or Ser or Cys or Asn or Val or Gln or Glu or Gly or Asp or Ile
  misc_feature (445)..(445): Thr or Ala or Absent or Leu or Gly or Lys or Asn or Gln or Glu or Asp
  misc_feature (446)..(446): Lys or Gln or Arg or Absent or Pro or Gly or Ile or Leu or Glu or Asp or Thr or Val or Ser or Asn
  misc_feature (447)..(447): Arg or Lys or Absent or Leu or Val or Gln or Ile or Ala or Glu or Asn or Asp or Ser
  misc_feature (448)..(448): Absent or Phe or Tyr or Gly or Thr or Trp or Gln or Pro or Asp or Asn or Ala or Glu
  misc_feature (449)..(449): Leu or Arg or Lys or Absent or Glu or His or Gln or Ser or Val or Ala or Met or Ile
  misc_feature (450)..(450): Pro or Absent or Leu or Ile or Val
  misc_feature (451)..(451): Val or Ile or Absent or Ser or Thr
  misc_feature (452)..(452): Ala or Gln or Absent or Val or Ile or Glu or Thr
  misc_feature (454)..(454): Ala or Absent or Ser or Lys or Pro or Asn or Arg or Tyr or His or Gln
  misc_feature (455)..(455): Met or Val or Absent or Tyr or Phe or Asn
  misc_feature (461)..(461): Gly or Absent or Lys or Asn or Asp or Ala
  misc_feature (462)..(462): Val or Pro or Absent or Ser or Asn or Ile or Leu or Lys or Phe or Met or Ala or Gln or Glu or Arg
  misc_feature (464)..(464): Pro or Gln or Absent or Asn or Arg or Leu or Lys or Val or Glu or Asp
  misc_feature (466)..(466): Lys or Asp or Glu or Absent or Thr or Asn or Ile or Met or Pro or Ala or Gln
  misc_feature (467)..(467): Ala or Absent or Asn or Pro or Val or Ile or Gly or Leu or Phe
  misc_feature (468)..(468): Phe or Absent or Trp or Lys or Pro or Leu or Ile or Val or Gln or Gly or Ser or Asp or Tyr
  misc_feature (469)..(469): Glu or Ser or His or Leu or Absent or Ile or Val or Pro
  misc_feature (470)..(470): Absent or Leu
  misc_feature (471)..(471): Absent or Gly or Phe or Ser or Pro or Thr or Asp or Glu or Asn
  misc_feature (472)..(472): Gly or Absent or Asn or Glu or Thr or Pro or Ala or Phe or Arg or Asp or Ser
  misc_feature (473)..(473): Lys or Gly or Glu or Absent or Ser or Asn or His or Asp or Thr or Arg
  misc_feature (474)..(474): Gly or Absent or Glu or Leu or Ile or His or Ala or Gln or Lys or Thr or Ser or Asn or Cys
  misc_feature (475)..(475): Val or Ser or Lys or Absent or Asn or Tyr or Gly or Arg or Ile or Phe or Thr or Ala or Gln or Asp or Met
  misc_feature (476)..(476): Leu or Absent or Thr or Val or Ala or Met or Tyr or Phe or Ile
  misc_feature (477)..(477): Phe or Tyr or Absent or Thr or Val or Ile
  misc_feature (482)..(482): Val or Absent or Ser or Ile or Leu
  misc_feature (483)..(483): Phe or His or Absent or Cys or Val or Met or Ile or Pro or Leu or Ala or Ser
  misc_feature (484)..(484): Leu or Absent or Val or Arg or Thr or Pro or His or Asn or Phe or Gln or Lys
  misc_feature (485)..(485): His or Absent or Ser or Phe or Lys or Asp or Glu or Gly or Pro or Arg or Asn or Ala or Gln
  misc_feature (486)..(486): His or Absent or Ala or Asp or Gly or Tyr or Glu or Asn or Gln or Ser
  misc_feature (487)..(487): Arg or Absent or Ser or Gln or Leu or Asn
  misc_feature (488)..(488): Leu or Gln or Absent or Ile or Ala or Met or Tyr or X
  misc_feature (490)..(490): Ser or Ala or Absent or Leu or Asp or Met or Thr or Asn or His
  misc_feature (491)..(491): Leu or Ala or Val or Absent or Arg or Tyr or Phe or His
  misc_feature (492)..(492): Leu or Val or Ile or Absent or Met
  misc_feature (493)..(493): Ser or His or Absent or Gln or Asp or Cys or Gly or Asn or Thr or Arg or Ala or Glu
  misc_feature (494)..(494): Ala or Pro or Absent or Ser or Thr or Asp or Leu or Arg or Glu or Lys or Val or Gly
  misc_feature (495)..(495): Glu or Asp or Absent or Asn or Arg or Lys or Gln
  misc_feature (496)..(496): Asp or Absent or Cys or Glu or Phe or Gly or Ser or Ala or Asn
  misc_feature (498)..(498): Ser or Pro or Absent or Lys or Gln or Glu or Arg
  misc_feature (499)..(499): Glu or Leu or Ser or Absent or Ala or Ile or Thr or Lys or Gln or Met or Asn or Tyr or Val or Phe
  misc_feature (500)..(500): Met or Leu or Absent or Ile or Val or Ala or Cys
  misc_feature (501)..(501): Lys or Ala or Absent or Leu or Ile or Gln or Met or Tyr or Thr or Ser or Glu
  misc_feature (503)..(503): Gly or Arg or Gln or Absent or Lys or Ser or Asn or Thr
  misc_feature (504)..(504): Ser or Lys or Absent or Asn or Glu or Gly or Tyr or Gln or Arg
  misc_feature (505)..(505): Ser or Arg or Absent or Glu or Pro or Gly or Leu or Gln or Thr
  misc_feature (506)..(506): Leu or Absent or Ile or Ala or Val
  misc_feature (507)..(507): Lys or Ala or Arg or Absent or Ser or Gln or His
  misc_feature (508)..(508): Lys or Gly or Absent or Ala or Arg or Pro or Gln
  misc_feature (509)..(509): Phe or Arg or Ile or Absent or Gln or Leu or Lys or Met or Asn or X or Ala
  misc_feature (510)..(510): Val or Leu or Thr or Cys or Absent or Ser or Ala or Asn or Gly
  misc_feature (511)..(511): Pro or Ile or Phe or Absent or Tyr
  misc_feature (512)..(512): Pro or Ser or Absent or Asp or Lys or Arg or Gln
  misc_feature (513)..(513): Thr or Absent or Ile or Asn or Val or Ser or Pro or Ala or Leu
  misc_feature (514)..(514): Pro or Absent or Asp or Ile or Phe or Cys or Ser
  misc_feature (515)..(515): Absent or Ala or Gln or Val or Ser or Gly or Ile or Leu or Pro
  misc_feature (516)..(516): Absent or Leu or Val
  misc_feature (517)..(517): Absent or Thr or Ala or Gln or Lys or Ser or Tyr or Pro
  misc_feature (518)..(518): Absent or Lys or Phe or Thr or Leu or Ser or Tyr
  misc_feature (519)..(519): Absent or Glu or Asp or Gly or Arg
  misc_feature (520)..(520): Absent or Asn or Gln or Pro
  misc_feature (521)..(521): Absent or Gln or Ile or Ser
  misc_feature (522)..(522): Absent or Glu
  misc_feature (523)..(523): Absent or Leu or Ser
  misc_feature (524)..(524): Absent or Phe or Thr
  misc_feature (525)..(525): Absent or Tyr or Leu
  misc_feature (526)..(526): Absent or Thr or Pro
  misc_feature (527)..(527): Absent or Ser or Met or Asp or Lys or Asn or Thr
  misc_feature (528)..(528): Glu or Absent or Lys or X or Ser or Phe or Gln or Val
  misc_feature (529)..(529): Cys or Absent or Thr or Val or Glu or Ile or Ser
  misc_feature (530)..(530): Ala or Absent or Thr or Gln or Leu or Ser or Glu
  misc_feature (531)..(531): Glu or Ala or Ser or Absent or Asn or Asp or Gly
  misc_feature (532)..(532): Pro or Cys or Asn or Absent or Arg or Gly or Ala or Ser
  misc_feature (533)..(533): Pro or Asp or Thr or Absent or Ile or Leu or Val or Ser
  misc_feature (534)..(534): Gly or Pro or Val or Thr or Absent or Lys or Asn or Arg
  misc_feature (535)..(535): Phe or Ser or Asp or Absent or Gly or Ile
  misc_feature (536)..(536): Ala or Leu or Asn or Val or Absent or Phe or Ser or Glu
  misc_feature (537)..(537): Ser or Gly or Glu or Absent or Asn or Lys or Ala or Thr or Gln or His or Leu or Asp
  misc_feature (538)..(538): Phe or Leu or Absent or Ile or Gly or Arg or Tyr or His or Pro or Glu or Asp or Ala or Ser or Asn
  misc_feature (539)..(539): Lys or Val or Asn or Ser or Absent or Gly or Gln or Glu or Phe or Ala
  misc_feature (540)..(540): Gly or Absent or Phe or Asn or Leu or Arg or Gln or Tyr
  misc_feature (541)..(541): Tyr or Gln or Leu or Asn or Absent or Phe or Trp or Gly or Thr or Met or Ala or Ser
  misc_feature (542)..(542): Ser or Thr or Absent or Gly or Leu or Glu or Ile or Val
  misc_feature (543)..(543): Leu or Ile or Absent or Ser or Phe or Met or His or Tyr
  misc_feature (544)..(544): Tyr or Phe or Absent or Ile or Ser or Met or Val or Leu
  misc_feature (545)..(545): Trp or Absent or Phe or Ile or Gly or Ser or Glu or Ala
  misc_feature (547)..(547): Ser or Gly or Absent or Trp
  misc_feature (549)..(549): Val or Absent or Leu or Gly or Tyr or Cys or Ala or Met or Ser
  misc_feature (551)..(551): Val or Ile or Absent or Arg or Lys or Phe or Leu
  misc_feature (553)..(553): Val or Absent or Ile or Asp or Leu or Tyr or Phe
  misc_feature (554)..(554): Leu or Val or Ile or Absent or Asp or Ser or Glu or Met or Ala
  misc_feature (555)..(555): Glu or Lys or Absent or Leu or Val or His or Tyr or Asn or Ser or Thr or Trp or Asp or Gln or Ala
  misc_feature (556)..(556): Cys or Ala or Val or Absent or Lys or Leu or Ser or Glu or Asn or Gly or Thr
  misc_feature (557)..(557): Pro or Leu or Absent or Val or Lys or Met or Thr or Glu or Asp or Ser or Gly or Asn or Ala or Gln
  misc_feature (558)..(558): Pro or Glu or Leu or Absent or Val or Asp or Gly or Asn
  misc_feature (559)..(559): Absent or Arg or Ile or Ala or Gln or Asp or Leu or Glu
  misc_feature (560)..(560): Asn or His or Arg or Absent or Gln or Glu or Pro or Leu or Ser or Lys or Thr or Ile
  misc_feature (561)..(561): Val or Ile or Thr or Ala or Ser or Absent or Glu or Pro or Lys or Leu or Met or Asn or Arg or Gln or His or Gly
  misc_feature (562)..(562): Thr or Ala or Arg or Absent or Ser or Glu or Leu or Cys or Ile or Tyr or Asn or Pro or Gly
  misc_feature (563)..(563): Phe or Leu or Absent or Cys or Thr or Val or Ile or Met or Gly
  misc_feature (564)..(564): Gly or Thr or Ile or Absent or Ser or Leu or Cys or Arg or His or Val
  misc_feature (565)..(565): Phe or Met or Absent or Thr or Leu or Ile or Val or Cys or Ala or Gly
  misc_feature (566)..(566): Phe or Tyr or Absent or Thr or Met or Trp or His or Asn
  misc_feature (567)..(567): Gly or Absent or Tyr or Phe or Gln or Ser or Ala or Val or Lys or Asn or Thr or Met or Leu
  misc_feature (568)..(568): Pro or Absent or Gly or Tyr or Ser or Ala or Asn or Glu or Asp
  misc_feature (569)..(569): Lys or Asn or Absent or Pro or Gly or Gln or Arg or His or Ser
  misc_feature (570)..(570): Ser or Gly or Lys or Absent or Ala or Pro or Glu or Asp or His or Asn or Gln or Arg
  misc_feature (572)..(572): Arg or Pro or Gln or Ser or Lys or Absent or Asn or Leu or Glu or Thr or Asp or His or Phe or Met or Tyr
  misc_feature (573)..(573): Val or Ile or Absent or Phe or Gln or Arg or Leu
  misc_feature (574)..(574): Ser or Leu or Lys or Asn or Absent or His or Pro
  misc_feature (575)..(575): Leu or Gly or Val or Met or Absent or Ile or His or Pro or Ala or Glu or Arg
  misc_feature (576)..(576): Met or Thr or Val or Absent or His or Phe or Gly or Cys or Ser
  misc_feature (577)..(577): Lys or Leu or Pro or Absent or Val or Met or Thr or Arg or Asn
  misc_feature (578)..(578): Thr or Absent or Pro or Val or Arg or Ile or Lys or Leu or Met
  misc_feature (579)..(579): Ala or Pro or Ser or Thr or Absent or Asp or Lys or Glu or Ile or Gln or Val
  misc_feature (580)..(580): Asp or Gln or Glu or Absent or Lys or Thr or Asn or Arg or Gly
  misc_feature (582)..(582): Pro or Glu or Asp or Absent or Ala or Gln or Val or Thr or Lys or Asn or Tyr or Ile or Phe or Ser
  misc_feature (583)..(583): Glu or Val or Gln or Absent or Asp or Ala or Cys or Lys or Met or Tyr or Arg or Ser or Asn
  misc_feature (584)..(584): Thr or Phe or Absent or Glu or Val or Leu or Arg or Ile or Asn or Tyr
  misc_feature (585)..(585): Ile or Tyr or Absent or Phe or Glu or Met or Leu or Trp
  misc_feature (586)..(586): Ser or Glu or His or Lys or Absent or Gln or Tyr or Phe or Ala or Leu or Pro or Asn or Thr or Arg or Val or Asp or Ile
  misc_feature (587)..(587): Gly or Lys or Arg or Thr or Absent or Ala or Gln or Tyr or Asn or His or Ser or Asp
  misc_feature (588)..(588): Gln or Glu or Absent or Ser or Lys or Arg or Asn or Leu or His or Met
  misc_feature (589)..(589): Glu or Val or Leu or Absent or Lys or Thr or Phe or Tyr or His or Asn or Gly or Ala or Ile or Pro
  misc_feature (591)..(591): Ala or Absent or Leu or Gly or Asp or Thr or Ser or Glu or Lys or Val or Gln
  misc_feature (592)..(592): Ala or Absent or Gly or Ile or Leu or Val or Thr or Asn or Met or X
  misc_feature (593)..(593): Leu or Absent or Gly or Val or Phe or Pro or Arg or Lys or Ala or Ile
  misc_feature (594)..(594): Arg or Val or Ala or Thr or Met or Absent or Leu or Lys or Phe or Ile or Ser or Gln or Asn
  misc_feature (595)..(595): Leu or Arg or Absent or Thr or Pro or Cys or Gln or Asn or Val or X
  misc_feature (596)..(596): Val or Leu or Lys or Thr or Absent or Pro or Glu or Asp or Tyr or Ala
  misc_feature (597)..(597): Gln or Phe or Pro or Absent or Cys or Leu or Asn or Ile or Gly or Asp or Tyr or Glu or Ser or Ala or Arg or Thr or His
  misc_feature (598)..(598): Glu or Pro or Absent or Thr or Ser or Cys or Asp or Ile or Asn or Lys or Leu or Ala or Val or His or Gly
  misc_feature (599)..(599): Ile or Pro or Thr or Absent or Ala or Gly or Ser or Lys or Asp or Gln or Asn or Leu or Glu or Arg
  misc_feature (600)..(600): Asp or Gly or Absent or Lys or Ala or Glu or Pro or Asn or Gln or Ser or Thr or Tyr
  misc_feature (601)..(601): Phe or Gly or Lys or Gln or Absent or Ile or Glu or Arg or Ala or Asp or Asn or Val or Leu or Pro or Met
  misc_feature (602)..(602): Leu or Asp or Glu or Absent or Gln or Lys or Asn or Tyr or Arg or Ser or Phe or Ala or Gly or Thr
  misc_feature (603)..(603): Pro or Arg or Lys or Absent or Gly or Ala or Asn or Gln or Glu or Leu or Asp or Met or His or Ser
  misc_feature (604)..(604): Pro or Ala or Absent or Asp or Met or Lys or Glu or Phe or Leu or Val or X
  misc_feature (605)..(605): Met or Lys or Glu or Absent or Gly or Gln or Phe or His or Trp or Val or Ile or Asn or Pro or Arg or Ala
  misc_feature (606)..(606): His or Asn or Gly or Absent or Asp or Trp or Glu or Thr or Lys or Leu or Val or Gln or Pro or Ser or Ala or Arg
  misc_feature (607)..(607): Val or Trp or Absent or Met or Lys or Pro or Gly or Asp or Glu or Arg or Leu or Phe
  misc_feature (608)..(608): Asp or Pro or Cys or Gln or Thr or Val or Absent or Leu or Lys or Gly or Ile or His or Arg or Tyr or Ser or Glu
  misc_feature (609)..(609): Gly or Absent or Leu or Lys or Asn or Trp or Val or Glu or Ala or Arg or Pro or Gln or Ser
  misc_feature (610)..(610): Pro or Leu or Absent or Glu or Lys or Val or Ile or Phe or His or Arg or Tyr or Gln
  misc_feature (611)..(611): Leu or Val or Lys or Gln or Absent or Glu or Gly or Thr or Pro or Ile or Arg or Ser or Asp
  misc_feature (612)..(612): Val or Asn or Gly or Absent or Thr or Ile or Lys or Ser or Phe or Leu or Arg
  misc_feature (613)..(613): Asp or Gln or Ser or Val or Absent or Glu or Ile or Arg or His or Thr or Asn or Lys or Leu
  misc_feature (614)..(614): Leu or Glu or His or Arg or Absent or Gln or Ile or Val or Lys or Thr or Phe or Pro or Ala
  misc_feature (615)..(615): Ser or Val or Pro or Glu or Absent or Gln or Leu or Lys or Asn or Asp or Gly or Arg or Thr
  misc_feature (616)..(616): Val or Ile or Leu or Absent or Gln or Glu or Thr or Asp or His or Lys or Tyr or Ser or Asn
  misc_feature (617)..(617): Ser or Arg or Asp or Gln or Lys or Absent or Ile or Gly or Glu or Leu or Thr or Asn or Val or Pro
  misc_feature (618)..(618): Gly or Absent or Glu or Asn or Lys or Pro or Met or Gln or Ser or Thr or Val
  misc_feature (619)..(619): Leu or Absent or Glu or Thr or Ser or Gln or Gly or Lys or Asn or Arg or Met or Asp
  misc_feature (620)..(620): Gly or Absent or Asp or Ser or Lys or Asn or Glu or Trp or Thr or Val
  misc_feature (621)..(621): Gly or Absent or Trp or Thr or Tyr or Phe or Cys
  misc_feature (622)..(622): Trp or Absent or Arg or Asp
  misc_feature (623)..(623): Ile or Absent
  misc_feature (624)..(624): Arg or Absent
  misc_feature (625)..(625): Val or Absent
  misc_feature (626)..(626): Glu or Phe or Val or Ile or Absent or Lys
  misc_feature (627)..(627): Lys or Thr or Absent or Tyr or Glu
  misc_feature (628)..(628): Thr or Val or Met or Tyr or Absent or Phe or Glu or Ile
  misc_feature (629)..(629): Ser or Asn or Gly or Glu or Absent or Asp
  misc_feature (630)..(630): Gly or Ser or Asn or Glu or Absent or Asp or Ile or Val
  misc_feature (631)..(631): Arg or Asn or Leu or Ser or Absent or Ala or Glu or Val
  misc_feature (632)..(632): Gly or Lys or Ser or Asp or Absent or Glu or Arg
  misc_feature (633)..(633): Asp or Arg or Absent or Pro or Val
  misc_feature (634)..(634): Gly or Pro or Absent or Thr or Ser or Asn
  misc_feature (635)..(635): Pro or Ala or Val or Absent or Cys or Thr
  misc_feature (636)..(636): Ile or Gly or Cys or Ser or Absent or Asp or Val or Met
  misc_feature (637)..(637): Arg or Asp or Absent or Val or Asn or Ser or Glu or Cys
  misc_feature (638)..(638): Ala or Leu or Ile or Absent or Val
  misc_feature (639)..(639): His or Ala or Absent or Ile or Val or Ser or Cys or Phe or Met or Leu
  misc_feature (640)..(640): Ile or Absent or Ser or Val or Phe or Trp or Tyr
  misc_feature (641)..(641): Tyr or Ser or Absent or Gly or Ala or Lys or Pro or Phe or Ile or Glu
  misc_feature (646)..(646): Leu or Ile or Val or Absent or Ser or Phe or Met or Ala or Cys
  misc_feature (647)..(647): Glu or Ala or Ser or Absent or Val or Thr or Gly or Asn or Arg or Pro
  misc_feature (648)..(648): Glu or Val or Ile or Absent or Leu or Phe or Cys or Ala or Pro or Arg or Thr or Gly
  misc_feature (649)..(649): Asn or Gly or Glu or Absent or Pro or Arg or Lys or Asp or Gln or His or Thr or Ala
  misc_feature (650)..(650): Val or Pro or Absent or Arg or Cys or Ile or Gly or Ala or Thr or Asp or Asn or Glu or Lys or Gln or Ser
  misc_feature (651)..(651): Ile or Val or Gly or Leu or Ser or Absent or Asn or Ala or Gln or Lys or Glu or Thr or Pro or Asp
  misc_feature (652)..(652): Phe or Tyr or Pro or Gly or Absent or Ser or Lys or Arg or His or Asn or Thr or Glu or Ala
  misc_feature (653)..(653): Arg or Ser or Val or Absent or Lys or Ala or Gly or Pro or Glu or Asp
  misc_feature (654)..(654): Asn or Absent or Thr or Pro or Ser or Val or Glu or Gln or Met or Lys
  misc_feature (655)..(655): Cys or Absent or Asn or Ser or Leu or Arg or Gly or His or Glu or Gln or Lys or Ile or Asp or Pro or Ala
  misc_feature (656)..(656): Phe or Absent or Val or Ser or Asn or Arg or Thr or Lys or Gly or Pro or Ala or Ile or Gln or Cys
  misc_feature (657)..(657): Ala or Absent or Thr or Asp or Ser or Asn or Lys or Ile or Leu or Gly or Cys or Met or Arg or Gln or Val
  misc_feature (658)..(658): His or Absent or Gly or Pro or Ser or Ala or Asp or Glu or Thr or Asn or Phe or Met or Ile or Val or Leu or Cys
  misc_feature (659)..(659): Val or Absent or Ala or Asp or Pro or Gln or Ile or Arg or Lys or Gly or Asn or Glu or Cys or Thr or Leu
  misc_feature (660)..(660): Ser or Absent or Glu or Asp or Leu or Val or Pro or Arg or Gln or Thr or Ile or Ala or His or Gly
  misc_feature (661)..(661): Val or Glu or Asp or Cys or Ser or Asn or Absent or His or Lys or Ile or Trp or Pro or Arg or Tyr or Thr
  misc_feature (662)..(662): Arg or Glu or Leu or Val or Ala or Absent or Pro or Thr or Lys or Gln or Ser or Tyr
  misc_feature (663)..(663): Ala or Glu or Asp or Absent or Val or Asn or Leu or Ser or Pro or Trp or Gln or Arg
  misc_feature (664)..(664): Thr or Glu or Absent or Pro or Asp or Asn or Gln or Lys or Ser
  misc_feature (665)..(665): His or Thr or Leu or Glu or Val or Absent or Ala or Lys
  misc_feature (666)..(666): Gly or Ser or Asp or Tyr or Absent or Ala or Glu or Asn or Thr or His or Lys
  misc_feature (667)..(667): Leu or Tyr or Thr or Gly or Absent or Asn or Val or Ile or Cys
  misc_feature (668)..(668): Val or Ile or Gly or Asp or Glu or Absent or Lys or Ala or Leu or Ser or His or Phe or Trp
  misc_feature (669)..(669): Gln or Asn or Asp or Ser or Gly or Absent or Leu or Ile or Val or Thr or Ala
  misc_feature (670)..(670): Arg or His or Lys or Gly or Absent or Glu or Val or Ser or Thr or Ile or Ala or Phe or Leu or Met
  misc_feature (671)..(671): Val or Gln or Glu or Absent or Leu or Ile or Thr or Met or Arg or Gly
  misc_feature (672)..(672): Pro or Val or Leu or Absent or Thr or Ile or Arg or His or Ala or Asn
  misc_feature (673)..(673): His or Arg or Absent or Gln or Phe or Ile or Glu or Lys or Ala or Asn or Pro
  misc_feature (674)..(674): Asn or Leu or Absent or Val or Ile or Ala or Pro or Tyr or Gln or Ser or Gly
  misc_feature (675)..(675): Arg or Leu or Val or Absent or Ser or Ala or Cys or Phe or Ile or Met or Pro
  misc_feature (676)..(676): Ser or Val or Absent or Ile or His or Leu or Phe
  misc_feature (677)..(677): Met or Tyr or His or Absent or Gln or Val or Ser or Asn or Pro or Leu or Ile or Thr or Gly
  misc_feature (678)..(678): Ile or Thr or Val or Absent or Pro or Asp or Lys
  misc_feature (679)..(679): Asp or Pro or Ala or Absent or Lys or Asn or Arg or Met
  misc_feature (680)..(680): Asp or Lys or Absent or Asn or Pro or Arg or Ala
  misc_feature (681)..(681): Gly or Ala or Pro or Absent or Val or Glu
  misc_feature (682)..(682): Val or Absent or Glu or Met or Ser
  misc_feature (683)..(683): Leu or Glu or Ala or Absent or Ile or Phe
  misc_feature (684)..(684): Asn or Val or Ile or Absent or Phe or Glu
  misc_feature (685)..(685): Pro or Phe or Absent or Val or Arg or Lys
  misc_feature (686)..(686): Gln or Met or Val or Absent or Arg or Leu or Pro
  misc_feature (687)..(687): Glu or Arg or Absent or Pro or Gly
  misc_feature (688)..(688): Leu or Pro or Ala or Absent or Val or Phe
  misc_feature (689)..(689): Pro or Ser or Absent or Leu or Thr
  misc_feature (690)..(690): Pro or Ile or Met or Leu or Absent or Ser
  misc_feature (691)..(691): Pro or Absent or Val or Leu or Trp
  misc_feature (692)..(692): Ser or Val or Ile or Absent or Gly or Leu
  misc_feature (693)..(693): Asp or Gly or Absent or Lys or Ser or Pro
  misc_feature (694)..(694): Ala or Val or Arg or Lys or Absent or Thr
  misc_feature (695)..(695): Gln or Asn or Leu or Ala or Absent or Gly or Ser
  misc_feature (696)..(696): Arg or Ala or Gly or Absent or Gln or Ile
  misc_feature (697)..(697): Ala or Ser or Absent or Gly or Gln or Thr
  misc_feature (698)..(698): Arg or Asp or Thr or Gln or Absent or Glu or Trp
  misc_feature (699)..(699): Gly or Trp or Absent or Tyr or Ala or Val
  misc_feature (700)..(700): Trp or Tyr or Absent or Asp or His or Ile
  misc_feature (701)..(701): Arg or Glu or Gln or Absent or Tyr or Ala or Gly
  misc_feature (702)..(702): Tyr or Absent or Arg or Ala or Asn
  misc_feature (703)..(703): Asp or Met or Ser or Gln or Absent or Arg or Glu or Val
  misc_feature (704)..(704): Tyr or Glu or Absent or Leu or Lys or Thr
  misc_feature (705)..(705): Ser or Val or Leu or Absent or Thr or Glu or Lys
  misc_feature (706)..(706): Ser or Glu or Thr or Absent or Lys or Leu
  misc_feature (707)..(707): Cys or Asp or Glu or Absent or Lys
  misc_feature (708)..(708): Thr or Asp or Glu or Val or Absent or Lys or Ala
  misc_feature (709)..(709): Arg or Glu or Absent or Ser or Gln
  misc_feature (710)..(710): Glu or Ser or Absent or Val or Arg
  misc_feature (711)..(711): His or Glu or Absent or Val or Ala or Arg
  misc_feature (712)..(712): Leu or Absent or Thr or Val or Ile or Arg or Met or Glu or Lys
  misc_feature (713)..(713): Asp or Absent or Arg or Pro or Lys
  misc_feature (714)..(714): Ala or Absent or Pro or Lys or Arg or Leu
  misc_feature (715)..(715): Leu or Absent or Lys or Gln or Trp or Gly or Glu
  misc_feature (716)..(716): Lys or Absent or Val or Trp or Phe or Gly or Asp
  misc_feature (717)..(717): Gln or Absent or Ser or His or Tyr or Phe or Ala or Glu
  misc_feature (718)..(718): Leu or Absent or Tyr or Phe or Gly or Asp
  misc_feature (719)..(719): Phe or Absent or Gly or Thr
  misc_feature (720)..(720): Val or Absent or Asp
  misc_feature (721)..(721): Asp or Absent or Gly
  misc_feature (722)..(722): Lys or Absent or Gly
  misc_feature (723)..(723): Gln or Absent or Asp
  misc_feature (724)..(724): Thr or Absent or Gly
  misc_feature (725)..(725): Ile or Absent or Gly
  misc_feature (726)..(726): Ala or Absent or Gly
  misc_feature (727)..(727): Leu or Absent or Gly
  misc_feature (728)..(728): Asp or Absent or Gly
  misc_feature (729)..(729): Lys or Absent or Gly
  misc_feature (730)..(730): Phe or Absent or Glu
  misc_feature (731)..(731): Val or Absent or Gly
  misc_feature (732)..(732): Ala or Absent or Arg
  misc_feature (733)..(733): Arg or Absent or Val
  misc_feature (734)..(734): Pro or Absent or Val
  misc_feature (735)..(735): Thr or Absent or Ser
  misc_feature (736)..(736): Gln or Absent or Arg
  misc_feature (737)..(737): Thr or Absent or Gly
  misc_feature (738)..(738): Asp or Absent or Glu
  misc_feature (739)..(739): Ala or Absent or Arg
  misc_feature (740)..(740): Lys or Absent or Gly
  misc_feature (741)..(741): Gly or Absent or Trp
  misc_feature (742)..(742): Asn or Absent or Glu
  misc_feature (743)..(743): Gln or Absent or Ala or Tyr
  misc_feature (744)..(744): Ile or Absent or Ala or Met
  misc_feature (745)..(745): Thr or Absent or Gly
  misc_feature (746)..(746): Leu or Absent or Ala
  misc_feature (747)..(747): Tyr or Absent or Val or Ser
  misc_feature (748)..(748): Asp or Absent or Pro or Ile
  misc_feature (749)..(749): Phe or Absent or Ala or Glu
  misc_feature (750)..(750): Thr or Absent or Val or Ile
  misc_feature (751)..(751): Gly or Absent or Ser
  misc_feature (752)..(752): Gly or Absent or Arg or Ala
  misc_feature (753)..(753): Ala or Absent or Ser
  misc_feature (754)..(754): Lys or Absent or Gly
  misc_feature (755)..(755): Ile or Absent or Gly
  misc_feature (756)..(756): Arg or Absent or Gly
  misc_feature (757)..(757): Gln or Absent or Gly
  misc_feature (758)..(758): Ala or Absent or Gly
  misc_feature (759)..(759): Lys or Absent or Gly
  misc_feature (760)..(760): Gln or Absent or Gly
  misc_feature (761)..(761): Met or Absent or Arg
  misc_feature (762)..(762): Ala or Absent or Gly
  misc_feature (763)..(763): Arg or Absent or Gly
  misc_feature (764)..(764): Asn or Absent or Arg
  misc_feature (765)..(765): Asp or Absent or Gly
  misc_feature (766)..(766): Glu or Absent or Gly
  misc_feature (767)..(767): Leu or Absent or Gly
  misc_feature (768)..(768): Glu or Absent or Arg
  misc_feature (769)..(769): His or Absent or Gly
  misc_feature (770)..(770): Glu or Absent or Gly
  misc_feature (771)..(771): Gln or Absent or Arg
  misc_feature (772)..(772): Glu or Absent or Gly
  misc_feature (773)..(773): Arg or Absent
  misc_feature (774)..(774): Leu or Absent or Gly
  misc_feature (775)..(775): Lys or Absent or Gly
  misc_feature (776)..(776): Arg or Absent
  misc_feature (777)..(777): Trp or Absent or Ser
  misc_feature (778)..(778): Arg or Absent or Ser
  misc_feature (779)..(779): Asp or Absent or Gly
  misc_feature (780)..(780): Gly or Absent
  misc_feature (781)..(781): Asn or Absent or Arg
  misc_feature (782)..(782): Asp or Absent or Gly
  misc_feature (783)..(783): Ala or Absent or Gly
  misc_feature (784)..(784): Cys or Absent or Asn
  misc_feature (785)..(785): Leu or Absent or Ser
  unsure (1)..(785): unsure at all Xaa locations
XXXXXXXXXXXXXXXXXXXXXXXXXXXXXXXXXXXXXXXXXXXXXXXXXXXXXXXXXXXXXXXXXXXXXXXXXXXXXXXXXXXXXXXXXXXXXXXXXXXXXXXXXXXXXXXXXXXXXXXXXXXXXXXXXXXXXXXXXXXXXXXXXXXXXXXXXXXXXXXXXCXGCGXXXQXXXXXXXXXGXXXXXXXXXXXXXXXXXXXXXXXXXXXXXXXXXXXXXXXXXXXXXXXXXXXXXXXXXXXXXXXXXXXXXXXXXXXXXCXRCXXLXHXXXXXXXXXXXXXXXXXXXFXXXXXXXXXXXXXXXXXXLXVXXXDXXDFXGSXXXXXXXXXXXXXXXXXXXXXXXXXXNXXXLVXXKXDXLPXXXXXXXXXXXXXXXXXXXXXXXXXXXXXLXSXXXXXXXXXXXXXIXXXXXXXDXVYXXGXXNVGKSXXINXXXXXXXXXXXXXXXXXXXXXXXSXXPGTTLXXIXIXXXXXXXXXXXXDTPGXXXXXXXAXXXXXXXLXXXXPXXXXXXXXXXXXXXXXXXXXXXXXXXXXXXXXXXXXXXXXXXXGXLXRXDXXXXXXXXXXXXXXXXXXLXXXXXXXXXAXXXXXXXXGXXXXXXXXXXXXXXXXXXXXXXXXXXXXXXXXXXXXXXXXXXXXXXXXXXXGLGWXXXXXXXXXXXXXXXXXXXXXXXXXXXXXXXXXXXXXXXXXXXXXXXXXXXXXXXXXXXXXXXXXXXXXXXXXXXXXXXXXXXXXXXXXXXXXXXXXXXXXXXXXXXXXXXXXXXXXXXXXXXXXXXXXXXXXXXXXXXX

SEQ ID NO: 36461 - protein, 413 aa, Artificial sequence
  consensus sequence of seq id no: 426  and its homologs
  misc_feature (1)..(1): Absent or Thr
  misc_feature (2)..(2): Absent or Cys
  misc_feature (3)..(3): Absent or Gly
  misc_feature (4)..(4): Absent or Leu
  misc_feature (5)..(5): Absent or Gly
  misc_feature (6)..(6): Absent or Arg
  misc_feature (7)..(7): Absent or Glu
  misc_feature (8)..(8): Gln or Absent or Thr
  misc_feature (9)..(9): His or Absent or Pro
  misc_feature (10)..(10): Gln or Absent or Glu
  misc_feature (11)..(11): His or Absent or Gly
  misc_feature (12)..(12): Ser or Absent or Gly or Arg
  misc_feature (13)..(13): Ser or Absent or Arg
  misc_feature (14)..(14): Leu or Absent or Pro
  misc_feature (16)..(16): Thr or Absent or Pro or Cys
  misc_feature (17)..(17): Thr or Absent or Ser or Cys
  misc_feature (18)..(18): Ser or Absent or Leu or Arg
  misc_feature (19)..(19): Thr or Absent or Arg or Cys
  misc_feature (20)..(20): Arg or Absent or Gly
  misc_feature (21)..(21): Ser or Absent or Asp or Thr
  misc_feature (22)..(22): Leu or Absent or Gly
  misc_feature (23)..(23): Leu or Absent or Pro
  misc_feature (24)..(24): Ser or Absent or Cys
  misc_feature (25)..(25): His or Absent or Ala
  misc_feature (26)..(26): Asp or Absent or Ala or Pro
  misc_feature (27)..(27): Arg or Absent or Ala or Thr
  misc_feature (28)..(28): Leu or Absent or Ala or Gly
  misc_feature (29)..(29): Thr or Absent or His or Cys
  misc_feature (30)..(30): Pro or Absent or Ser
  misc_feature (31)..(31): His or Absent or Phe or Ser
  misc_feature (32)..(32): Pro or Absent or Leu or Cys
  misc_feature (33)..(33): Arg or Absent or Pro or Ala
  misc_feature (34)..(34): Gly or Absent or Ser or Pro
  misc_feature (35)..(35): Arg or Absent or Ser
  misc_feature (36)..(36): Leu or Absent or Val or Gly
  misc_feature (37)..(37): Gln or Absent or Ser or Arg
  misc_feature (38)..(38): Glu or Absent or Arg
  misc_feature (39)..(39): Leu or Absent or His or Arg
  misc_feature (40)..(40): Glu or Ala or Absent or Arg
  misc_feature (41)..(41): Asp or Thr or Absent or Gly
  misc_feature (42)..(42): Ile or Thr or Absent or Gly
  misc_feature (43)..(43): Glu or Ser or Absent or Val or Thr
  misc_feature (44)..(44): Glu or Asn or Absent or Arg
  misc_feature (45)..(45): Leu or Thr or Absent or Met or Ala
  misc_feature (46)..(46): Glu or Met or Absent or Ser
  misc_feature (47)..(47): Arg or Ser or Absent or Glu
  misc_feature (48)..(48): Absent or Thr or Gln
  misc_feature (49)..(49): Absent or Asp or Glu
  misc_feature (50)..(50): Absent or Leu or Ala
  misc_feature (51)..(51): Absent or Leu or Pro or Ser
  misc_feature (52)..(52): Absent or Leu or Trp
  misc_feature (53)..(53): Absent or Gln or Arg or Ser
  misc_feature (54)..(54): Absent or Ser
  misc_feature (55)..(55): Absent or Ser or Pro
  misc_feature (56)..(56): Absent or Ser or Cys
  misc_feature (57)..(57): Absent or Lys or Pro
  misc_feature (58)..(58): Absent or Leu or Gln
  misc_feature (59)..(59): Absent or Ser or Val
  misc_feature (60)..(60): Absent or Gln or Pro
  misc_feature (61)..(61): Absent or Lys or Gly
  misc_feature (62)..(62): Absent or Gln or Asn
  misc_feature (63)..(63): Absent or Asp or Cys
  misc_feature (64)..(64): Absent or Tyr or Ser
  misc_feature (65)..(65): Absent or Ile or Ser
  misc_feature (66)..(66): Absent or Phe or Leu
  misc_feature (67)..(67): Absent or His or Glu
  misc_feature (68)..(68): Absent or Gly or Lys
  misc_feature (69)..(69): Absent or Gly or Glu
  misc_feature (70)..(70): Absent or Arg or Val
  misc_feature (71)..(71): Absent or Arg or Ala
  misc_feature (72)..(72): Absent or His or Gln
  misc_feature (73)..(73): Absent or Val or Thr
  misc_feature (74)..(74): Absent or Arg or Leu
  misc_feature (75)..(75): Absent or Pro
  misc_feature (76)..(76): Absent or Tyr or Arg
  misc_feature (77)..(77): Absent or Tyr or Ser
  misc_feature (78)..(78): Absent or Phe or Gln
  misc_feature (79)..(79): Absent or Glu or His
  misc_feature (80)..(80): Absent or Phe
  misc_feature (81)..(81): Absent or Ile or Gln
  misc_feature (82)..(82): Absent or Ser or Gly
  misc_feature (83)..(83): Absent or His
  misc_feature (84)..(84): Absent or Val or Asn
  misc_feature (85)..(85): Absent or Asn or His
  misc_feature (86)..(86): Arg or Lys or Absent or His
  misc_feature (87)..(87): Met or Arg or Absent or Gln
  misc_feature (88)..(88): Trp or Absent or Glu
  misc_feature (89)..(89): Arg or Thr or Absent or Gly
  misc_feature (90)..(90): Asp or Gly or Absent or Pro
  misc_feature (91)..(91): Arg or Lys or Absent or His or Trp
  misc_feature (92)..(92): Met or Thr or Absent or Cys or Ala
  misc_feature (93)..(93): Lys or Ile or Absent or Pro
  misc_feature (94)..(94): Leu or Val or Absent or Cys
  misc_feature (95)..(95): Lys or Asp or Absent or His or Arg
  misc_feature (96)..(96): Arg or Leu or Absent
  misc_feature (97)..(97): Leu or Phe or Absent or Arg
  misc_feature (98)..(98): Arg or Ala or Absent or His
  misc_feature (99)..(99): Glu or Asp or Absent or Arg
  misc_feature (100)..(100): Leu or Glu or Absent or Gly
  misc_feature (101)..(101): Gln or Phe or Absent or Asp
  misc_feature (102)..(102): Gln or Lys or Absent
  misc_feature (103)..(103): Thr or Gly or Absent or Glu
  misc_feature (104)..(104): Arg or Absent or Asp
  misc_feature (105)..(105): Gly or Pro or Absent or Ile
  misc_feature (106)..(106): Lys or Arg or Absent or Ser
  misc_feature (107)..(107): Asp or Absent or Phe
  misc_feature (108)..(108): Ser or Tyr or Absent or Leu
  misc_feature (109)..(109): Leu or Tyr or Absent or His
  misc_feature (110)..(110): Ala or Val or Absent or Leu
  misc_feature (111)..(111): Ser or Gly or Absent or Gln
  misc_feature (112)..(112): Gly or Ala or Absent or Gln
  misc_feature (113)..(113): Ala or Val or Absent or Ile
  misc_feature (114)..(114): Gly or Lys or Absent or Cys
  misc_feature (115)..(115): Absent or Ser or Ile
  misc_feature (116)..(116): Absent or Gly
  misc_feature (117)..(117): Absent or Arg or Lys
  misc_feature (118)..(118): Absent or Ile or Leu
  misc_feature (119)..(119): Absent or Lys or Leu
  misc_feature (120)..(120): Absent or Val or Leu
  misc_feature (121)..(121): Absent or Asp or Gly
  misc_feature (122)..(122): Absent or Gly or Val
  misc_feature (123)..(123): Absent or Glu or Pro
  misc_feature (124)..(124): Absent or Ile or Ala
  misc_feature (125)..(125): Absent or Val or Lys
  misc_feature (126)..(126): Absent or Pro or Glu
  misc_feature (127)..(127): Absent or Val or Asn
  misc_feature (128)..(128): Absent or Ser or Asp
  misc_feature (129)..(129): Absent or Tyr or Leu
  misc_feature (130)..(130): Absent or Ile
  misc_feature (131)..(131): Absent or Val
  misc_feature (132)..(132): Absent or Lys
  misc_feature (133)..(133): Absent or Ser
  misc_feature (134)..(134): Absent or Ser
  misc_feature (135)..(135): Absent or Gln
  misc_feature (136)..(136): Absent or Lys or Ile
  misc_feature (137)..(137): Absent or Ile or Phe
  misc_feature (138)..(138): Absent or Thr or Ala
  misc_feature (139)..(139): Absent or His or Trp
  misc_feature (140)..(140): Absent or Phe or Leu
  misc_feature (141)..(141): Absent or Leu or Phe
  misc_feature (142)..(142): Absent or His or Leu
  misc_feature (143)..(143): Absent or Arg or Ile
  misc_feature (144)..(144): Absent or His or Ser
  misc_feature (145)..(145): Absent or Glu or Ser
  misc_feature (146)..(146): Absent or Pro or Tyr
  misc_feature (147)..(147): Absent or Pro
  misc_feature (148)..(148): Absent or Val or Met
  misc_feature (149)..(149): Absent or Met or Ile
  misc_feature (150)..(150): Absent or Ile or Leu
  misc_feature (151)..(151): Absent or Asp or Gln
  misc_feature (152)..(152): Absent or Asp or His
  misc_feature (153)..(153): Absent or Val or Ile
  misc_feature (154)..(154): Absent or Val or His
  misc_feature (155)..(155): Absent or Ile or Ser
  misc_feature (156)..(156): Absent or Leu or Phe
  misc_feature (157)..(157): Absent or His or Leu
  misc_feature (158)..(158): Absent or Gln
  misc_feature (159)..(159): Absent or Glu or Gly
  misc_feature (160)..(160): Absent or Pro or Ser or Ala
  misc_feature (161)..(161): Absent or Asp or Lys or Pro
  misc_feature (162)..(162): Absent or Val
  misc_feature (163)..(163): Absent or Val or Leu
  misc_feature (164)..(164): Absent or Thr or Arg
  misc_feature (165)..(165): Leu or Val or Absent or Ser
  misc_feature (166)..(166): Ala or Cys or Absent or Arg
  misc_feature (167)..(167): Asp or Lys or Absent or Arg
  misc_feature (168)..(168): Gly or Pro or Absent or Phe
  misc_feature (169)..(169): X or Ala or Absent or Ile
  misc_feature (170)..(170): Ser or Absent or Thr
  misc_feature (171)..(171): Lys or Val or Absent or Ile
  misc_feature (173)..(173): Arg or Val or Absent or Ser
  misc_feature (174)..(174): Gln or His or Absent or Thr
  misc_feature (175)..(175): Ser or Pro or Absent or Thr
  misc_feature (176)..(176): Gln or Cys or Absent or Tyr
  misc_feature (177)..(177): Glu or Gly or Absent or His
  misc_feature (179)..(179): Ala or Tyr or His
  misc_feature (180)..(180): Arg or Gln
  misc_feature (181)..(181): Arg or Lys or His
  misc_feature (182)..(182): Lys or Asn or Ser
  misc_feature (183)..(183): Lys or Thr or Ser
  misc_feature (184)..(184): Met or Ile or Leu
  misc_feature (186)..(186): Absent or Gly
  misc_feature (187)..(187): Absent or Ile
  misc_feature (188)..(188): Absent or Leu
  misc_feature (189)..(189): Absent or Asp
  misc_feature (190)..(190): Absent or Ala
  misc_feature (191)..(191): Absent or Glu
  misc_feature (192)..(192): Absent or His
  misc_feature (193)..(193): Absent or Asp
  misc_feature (194)..(194): Absent or Leu
  misc_feature (195)..(195): Absent or Gly
  misc_feature (196)..(196): Absent or Thr
  misc_feature (197)..(197): Absent or Leu
  misc_feature (198)..(198): Absent or Phe
  misc_feature (199)..(199): Absent or Ser
  misc_feature (200)..(200): Absent or Ile or Thr
  misc_feature (201)..(201): Arg or His or Thr
  misc_feature (202)..(202): Ala or Arg or Ser
  misc_feature (203)..(203): Gln or Leu or Thr
  misc_feature (204)..(204): Asp or Arg
  misc_feature (205)..(205): Gly or Arg or Ser
  misc_feature (209)..(209): Tyr or Gly or His
  misc_feature (210)..(210): Met or Leu or Asp
  misc_feature (211)..(211): Leu or Arg
  misc_feature (212)..(212): Lys or Ile or Leu
  misc_feature (213)..(213): Met or Ile or Thr
  misc_feature (214)..(214): Met or Ala or Pro
  misc_feature (215)..(215): Glu or Arg or His
  misc_feature (216)..(216): Val or Thr or Pro
  misc_feature (217)..(217): Cys or Ala or Arg
  misc_feature (218)..(218): Arg or Ala or Gly
  misc_feature (219)..(219): Ala or Lys or Arg
  misc_feature (220)..(220): Gln or Ala or Leu
  misc_feature (221)..(221): Gly or Asp or Gln
  misc_feature (222)..(222): Phe or Glu
  misc_feature (223)..(223): Val or Phe or Pro or Leu or Gln
  misc_feature (224)..(224): Tyr or Arg or Asn or Asp or Gly
  misc_feature (225)..(225): Gly or Gln or Trp or Pro or Absent
  misc_feature (226)..(226): Ile or Gln or Arg or Trp or Absent
  misc_feature (227)..(227): Ile or Arg or Absent
  misc_feature (228)..(228): Pro or Glu or Absent or Lys
  misc_feature (229)..(229): Glu or Gly or Absent
  misc_feature (230)..(230): Lys or Gly or Absent or Cys
  misc_feature (231)..(231): Gly or Met or Val or Ile or Absent
  misc_feature (232)..(232): Lys or Val or Thr or Cys or Ala
  misc_feature (233)..(233): Pro or Lys or Val or Arg
  misc_feature (234)..(234): Val or Lys or Ser or Ile or Leu
  misc_feature (235)..(235): Ser or Arg or Met or Leu
  misc_feature (236)..(236): Gly or Tyr or Absent
  misc_feature (237)..(237): Ala or Ile or His or Leu or Absent
  misc_feature (238)..(238): Ser or Ala or Gly or Glu or Absent
  misc_feature (239)..(239): Asp or Lys or Arg or Ile or Absent
  misc_feature (240)..(240): Asn or Val or Ser or Lys or Arg
  misc_feature (241)..(241): Leu or Ile or Lys or Arg
  misc_feature (242)..(242): Arg or Gly or His or Ser or Gln
  misc_feature (243)..(243): Ala or Val or Gly or His
  misc_feature (244)..(244): Trp or Phe or Ala
  misc_feature (245)..(245): Trp or Pro or Lys or Gln
  misc_feature (246)..(246): Lys or Glu or Arg or Ile or Gly
  misc_feature (247)..(247): Glu or Asp or Val or Trp or Arg
  misc_feature (248)..(248): Lys or Glu or Tyr
  misc_feature (249)..(249): Val or Met or Ala or Arg or Asp
  misc_feature (250)..(250): Arg or Ile or Ala or Ser or Gln
  misc_feature (251)..(251): Phe or Val or Leu
  misc_feature (253)..(253): X or Ala or Val or Phe or His
  misc_feature (254)..(254): Absent or Asn or Gly or Ala
  misc_feature (255)..(255): Arg or Ile or Gly
  misc_feature (256)..(256): Asn or Val or Thr
  misc_feature (257)..(257): Gly or Tyr or Leu or Pro
  misc_feature (258)..(258): Pro or Asn or Ser
  misc_feature (259)..(259): Ala or Gly or Arg
  misc_feature (260)..(260): Ala or Ser or Gly or Absent
  misc_feature (261)..(261): Ile or Glu or Absent or Leu
  misc_feature (262)..(262): Ala or Gly or Absent or Pro
  misc_feature (263)..(263): Lys or Arg or Absent or Ile
  misc_feature (264)..(264): Tyr or Ser or Absent or Gln
  misc_feature (265)..(265): Gln or Thr or Absent or Ile
  misc_feature (266)..(266): Ala or Absent or Cys
  misc_feature (267)..(267): Asp or Glu or Absent or Cys
  misc_feature (268)..(268): Asn or Asp or Absent or Arg
  misc_feature (269)..(269): Ala or Absent or Trp or Arg
  misc_feature (270)..(270): Val or Asn or Absent or Arg
  misc_feature (271)..(271): Pro or Ser or Absent or Lys
  misc_feature (272)..(272): Gly or Ser or Absent or Glu
  misc_feature (273)..(273): Ala or Gly or Absent or Met
  misc_feature (274)..(274): Glu or Asp or Absent or Ser
  misc_feature (275)..(275): Asn or Asp or Absent or Ser
  misc_feature (276)..(276): Glu or Lys or Absent or Ser
  misc_feature (277)..(277): Leu or Lys or Ser or Pro
  misc_feature (278)..(278): Ala or Val or Phe or Leu
  misc_feature (279)..(279): Ser or Lys or Val or Asn or Gly
  misc_feature (280)..(280): Gly or Arg or Absent
  misc_feature (281)..(281): Ala or Lys or Absent or Cys
  misc_feature (282)..(282): Ala or Pro or Absent or Asn
  misc_feature (283)..(283): Ser or Ala or Absent or Gly
  misc_feature (284)..(284): Pro or Cys or Absent or Gln
  misc_feature (285)..(285): His or Thr or Absent or Cys
  misc_feature (286)..(286): Ser or Lys or Absent or Gly
  misc_feature (287)..(287): Leu or Phe or Absent or Pro
  misc_feature (288)..(288): Gln or Thr or Absent or Ser
  misc_feature (289)..(289): Glu or Arg or Absent or Cys
  misc_feature (290)..(290): Leu or Ile or Absent
  misc_feature (291)..(291): Gln or Asp or Absent or Cys
  misc_feature (292)..(292): Asp or Thr or Pro or Ala
  misc_feature (293)..(293): Thr or Asn or Met or Lys or Gln
  misc_feature (294)..(294): Thr or Gly or Glu or Cys
  misc_feature (295)..(295): Leu or Thr or Glu
  misc_feature (296)..(296): Gly or His or Thr or Arg or Gln
  misc_feature (297)..(297): Ser or Phe or Gly or Pro
  misc_feature (298)..(298): Leu or Glu or Arg or Gln
  misc_feature (300)..(300): Ser or Val or Ala or Gly
  misc_feature (301)..(301): Ala or Cys or Absent or Thr
  misc_feature (302)..(302): Leu or Glu or Absent or Ser
  misc_feature (303)..(303): Met or Pro or Absent or Phe
  misc_feature (304)..(304): Gln or Val or Absent or Ser
  misc_feature (305)..(305): His or Thr or Absent or Arg
  misc_feature (306)..(306): Cys or Gly or Absent or Leu
  misc_feature (307)..(307): Glu or Arg or Absent or Leu
  misc_feature (308)..(308): Pro or Thr or Absent or Gln
  misc_feature (309)..(309): Absent or His or Phe
  misc_feature (310)..(310): Absent or Gln or Pro
  misc_feature (311)..(311): Absent or Ile or Gly
  misc_feature (312)..(312): Absent or Arg or Thr
  misc_feature (313)..(313): Absent or Val or Gly
  misc_feature (314)..(314): Absent or His or Gln
  misc_feature (315)..(315): Absent or Leu or Gly
  misc_feature (316)..(316): Absent or Gln or Leu
  misc_feature (317)..(317): Absent or Tyr or Arg
  misc_feature (318)..(318): Absent or Thr or Gln
  misc_feature (319)..(319): Absent or Gly
  misc_feature (320)..(320): Absent or His or Ala
  misc_feature (321)..(321): Absent or Pro or Ser
  misc_feature (322)..(322): Absent or Ile or Cys
  misc_feature (323)..(323): Absent or Ala or Ser
  misc_feature (324)..(324): Absent or Asn or Ser
  misc_feature (325)..(325): Absent or Asp or Ile
  misc_feature (326)..(326): Absent or Pro or Ser
  misc_feature (327)..(327): Absent or Leu or Thr
  misc_feature (328)..(328): Absent or Tyr or Pro
  misc_feature (329)..(329): Absent or Leu or Ser
  misc_feature (330)..(330): Absent or Asn or Arg
  misc_feature (331)..(331): Absent or Gln or Cys
  misc_feature (332)..(332): Absent or His or Ser
  misc_feature (333)..(333): Absent or Ile or Leu
  misc_feature (334)..(334): Absent or Asp or Thr
  misc_feature (335)..(335): Absent or Asn or Glu
  misc_feature (336)..(336): Absent or Leu
  misc_feature (337)..(337): Absent or Glu or Gly
  misc_feature (338)..(338): Absent or Thr or Arg
  misc_feature (339)..(339): Absent or Tyr or Lys
  misc_feature (340)..(340): Absent or Ile or Leu
  misc_feature (341)..(341): Absent or Ala or Cys
  misc_feature (342)..(342): Absent or Lys or Ala
  misc_feature (343)..(343): Absent or Arg or Ala
  misc_feature (344)..(344): Absent or Ile or Ala
  misc_feature (345)..(345): Absent or Asp or Ala
  misc_feature (346)..(346): Absent or Ala or His
  misc_feature (347)..(347): Absent or Gly or Ser
  misc_feature (348)..(348): Absent or Glu or Ser or Pro
  misc_feature (349)..(349): Absent or Arg or Val or Gln
  misc_feature (350)..(350): Absent or Lys or Asn or Ser or Pro
  misc_feature (351)..(351): Absent or Ile or Ser or Pro or His
  misc_feature (352)..(352): Absent or Val or Leu
  misc_feature (353)..(353): Absent or Ser or Lys or His or Gln
  misc_feature (354)..(354): Absent or Pro or Asn or Arg or Gln
  misc_feature (355)..(355): Absent or Asp or Glu
  misc_feature (356)..(356): Absent or Asp or Gly
  misc_feature (357)..(357): Absent or Tyr or Leu
  misc_feature (358)..(358): Absent or Val or Ser or Gly
  misc_feature (359)..(359): Absent or Tyr or Cys or Arg
  misc_feature (360)..(360): Absent or Ser or Glu or Pro or Arg
  misc_feature (361)..(361): Absent or Ser or Leu or Pro or X
  misc_feature (362)..(362): Absent or Glu or Ser
  misc_feature (363)..(363): Absent or Asp or Gly
  misc_feature (364)..(364): Absent or Phe or Val
  misc_feature (365)..(365): Absent or Ser or Asn
  misc_feature (366)..(366): Absent or Ile or His or Arg
  misc_feature (367)..(367): Absent or Asp or Val or Pro
  misc_feature (368)..(368): Absent or Pro or Asn
  misc_feature (369)..(369): Absent or Met or Pro
  misc_feature (370)..(370): Absent or Cys or Gln
  misc_feature (371)..(371): Absent or Thr or Val
  misc_feature (372)..(372): Absent or Asn or X
  misc_feature (373)..(373): Absent or Cys
  misc_feature (374)..(374): Absent or Pro
  misc_feature (375)..(375): Absent or Lys
  misc_feature (376)..(376): Absent or Lys
  misc_feature (377)..(377): Absent or Leu
  misc_feature (378)..(378): Absent or Ile
  misc_feature (379)..(379): Absent or Pro
  misc_feature (380)..(380): Absent or Gln
  misc_feature (381)..(381): Absent or Gly
  misc_feature (382)..(382): Absent or Tyr
  misc_feature (383)..(383): Absent or Glu
  misc_feature (384)..(384): Absent or Glu
  misc_feature (385)..(385): Absent or His
  misc_feature (386)..(386): Absent or Asp
  misc_feature (387)..(387): Absent or Glu
  misc_feature (388)..(388): Absent or Ala
  misc_feature (389)..(389): Absent or Leu
  misc_feature (390)..(390): Absent or Trp
  misc_feature (391)..(391): Absent or Leu
  misc_feature (392)..(392): Absent or His
  misc_feature (393)..(393): Absent or Cys
  misc_feature (394)..(394): Absent or Val
  misc_feature (395)..(395): Absent or Gln
  misc_feature (396)..(396): Absent or Tyr
  misc_feature (397)..(397): Absent or Cys
  misc_feature (398)..(398): Absent or Gly
  misc_feature (399)..(399): Absent or Thr
  misc_feature (400)..(400): Absent or Gly
  misc_feature (401)..(401): Absent or Trp
  misc_feature (402)..(402): Absent or Glu
  misc_feature (403)..(403): Absent or Tyr
  misc_feature (404)..(404): Absent or Glu
  misc_feature (405)..(405): Absent or Cys
  misc_feature (406)..(406): Absent or Pro
  misc_feature (407)..(407): Absent or Tyr
  misc_feature (408)..(408): Absent or Pro
  misc_feature (409)..(409): Absent or Ser
  misc_feature (410)..(410): Absent or Trp
  misc_feature (411)..(411): Absent or Ala
  misc_feature (412)..(412): Absent or Ser
  misc_feature (413)..(413): Absent or Leu
  unsure (1)..(413): unsure at all Xaa locations
XXXXXXXXXXXXXXSXXXXXXXXXXXXXXXXXXXXXXXXXXXXXXXXXXXXXXXXXXXXXXXXXXXXXXXXXXXXXXXXXXXXXXXXXXXXXXXXXXXXXXXXXXXXXXXXXXXXXXXXXXXXXXXXXXXXXXXXXXXXXXXXXXXXXXXXXXXXXXXXXXXXXXXXXXXXPXXXXXQXXXXXXSXXXXXXXXXXXXXXXXXXXXLLSXXXXXXXXXXXXXXXXXXXXXXXXXXXXXXXXXXXXXXXXXXXDXXXXXXXXXXXXXXXXXXXXXXXXXXXXXXXXXXXXXXXXXXXXXXVXXXXXXXXXXXXXXXXXXXXXXXXXXXXXXXXXXXXXXXXXXXXXXXXXXXXXXXXXXXXXXXXXXXXXXXXXXXXXXXXXXXXXXXXXXXXXXXXXXXXXXXXXXXXXXXXXX

SEQ ID NO: 36462 - protein, 2804 aa, Artificial sequence
  consensus sequence of seq id no: 449  and its homologs
  misc_feature (1)..(1): Absent or Met
  misc_feature (2)..(2): Absent or Ala
  misc_feature (3)..(3): Absent or Lys
  misc_feature (4)..(4): Absent or Trp
  misc_feature (5)..(5): Absent or Phe
  misc_feature (6)..(6): Absent or Leu
  misc_feature (7)..(7): Absent or Asn
  misc_feature (8)..(8): Absent or Leu
  misc_feature (9)..(9): Absent or Val
  misc_feature (10)..(10): Absent or Phe
  misc_feature (11)..(11): Absent or Val
  misc_feature (12)..(12): Absent or Ala
  misc_feature (13)..(13): Absent or Leu
  misc_feature (14)..(14): Absent or Asn
  misc_feature (15)..(15): Absent or His
  misc_feature (16)..(16): Absent or Ser
  misc_feature (17)..(17): Absent or Arg
  misc_feature (18)..(18): Absent or Phe
  misc_feature (19)..(19): Absent or Gly
  misc_feature (20)..(20): Absent or Ile
  misc_feature (21)..(21): Absent or Ser
  misc_feature (22)..(22): Absent or Arg
  misc_feature (23)..(23): Absent or Ser
  misc_feature (24)..(24): Absent or Lys
  misc_feature (25)..(25): Absent or Thr
  misc_feature (26)..(26): Absent or Met or Ala
  misc_feature (27)..(27): Absent or Glu or Trp
  misc_feature (28)..(28): Absent or Met or Asn
  misc_feature (29)..(29): Absent or Pro or Leu
  misc_feature (30)..(30): Absent or Gly or Asp
  misc_feature (31)..(31): Absent or Arg or Gly
  misc_feature (32)..(32): Absent or Arg or Gly
  misc_feature (33)..(33): Absent or Ser or Phe
  misc_feature (34)..(34): Absent or Asn or Thr
  misc_feature (35)..(35): Absent or Tyr or Asp
  misc_feature (36)..(36): Absent or Thr or Ile
  misc_feature (37)..(37): Absent or Leu or Asp
  misc_feature (38)..(38): Absent or Leu or Ile
  misc_feature (39)..(39): Absent or Ser or Cys
  misc_feature (40)..(40): Absent or Gln or Cys
  misc_feature (41)..(41): Absent or Val or Gln
  misc_feature (42)..(42): Absent or Pro or Ser
  misc_feature (43)..(43): Absent or Asp or Gly
  misc_feature (44)..(44): Absent or Asp or Asn
  misc_feature (45)..(45): Absent or His or Gln or Tyr
  misc_feature (46)..(46): Absent or Phe or Thr or Val
  misc_feature (47)..(47): Absent or Ala or Phe
  misc_feature (48)..(48): Absent or Ala or Thr
  misc_feature (49)..(49): Absent or Ala or Ile
  misc_feature (50)..(50): Absent or Thr or Lys
  misc_feature (51)..(51): Absent or Ala or Lys
  misc_feature (52)..(52): Absent or Thr or Lys
  misc_feature (53)..(53): Absent or Ser or Val
  misc_feature (54)..(54): Absent or Phe or Thr
  misc_feature (55)..(55): Absent or Tyr or Leu
  misc_feature (56)..(56): Absent or Glu or Asp or Leu
  misc_feature (57)..(57): Absent or Ser or Ala
  misc_feature (58)..(58): Absent or Glu or Ala
  misc_feature (59)..(59): Absent or Gly or Ser or Tyr
  misc_feature (60)..(60): Absent or Lys or Arg
  misc_feature (61)..(61): Absent or Asn
  misc_feature (62)..(62): Absent or Asn or Ser
  misc_feature (63)..(63): Absent or Asn or Lys or Ser
  misc_feature (64)..(64): Absent or Asn or Gly or Ala
  misc_feature (65)..(65): Absent or Lys or Cys
  misc_feature (66)..(66): Absent or Ala or Met or Gly
  misc_feature (67)..(67): Absent or Lys or Ser
  misc_feature (68)..(68): Absent or Gly or Ser or Arg
  misc_feature (69)..(69): Absent or Asp or Leu or Trp
  misc_feature (70)..(70): Absent or Ser or Glu or Phe or Arg
  misc_feature (71)..(71): Absent or Arg or Lys
  misc_feature (72)..(72): Absent or Gly or Ser or Lys
  misc_feature (73)..(73): Absent or Phe or Lys
  misc_feature (74)..(74): Absent or Asp or Glu or Ile or Lys
  misc_feature (75)..(75): Absent or Trp or Arg or Lys
  misc_feature (76)..(76): Absent or Glu or Trp or Lys
  misc_feature (77)..(77): Absent or Thr or Gln or Met or Lys
  misc_feature (78)..(78): Absent or Gly or His or Lys or Asn
  misc_feature (79)..(79): Absent or Gly or Arg or Asn or Leu
  misc_feature (80)..(80): Absent or Gly or Ser or Leu or Lys
  misc_feature (81)..(81): Absent or Glu or Thr or Asn or Phe or Arg
  misc_feature (82)..(82): Absent or Tyr or Asp or Lys or Ala
  misc_feature (83)..(83): Absent or Arg or Ala or Met or Pro or Ser
  misc_feature (84)..(84): Absent or Ala or Asp or Lys
  misc_feature (85)..(85): Absent or Ala or Phe or Ser or Ile or His
  misc_feature (86)..(86): Absent or Pro or Arg or Ile or Lys
  misc_feature (87)..(87): Absent or Ala or Phe or Ser or Trp
  misc_feature (88)..(88): Absent or Asn or Lys or Gly or Ala or Gln
  misc_feature (89)..(89): Absent or Arg or Lys or Gln or Pro or His
  misc_feature (90)..(90): Absent or Ile or Val or Leu or Gln or Pro or Arg
  misc_feature (91)..(91): Absent or Gly or His or Ala or Gln or Ser
  misc_feature (92)..(92): Absent or Asn or Ile or Ser or Pro or His or Arg
  misc_feature (93)..(93): Absent or Val or Pro or Gly or Gln or Asp or Ser
  misc_feature (94)..(94): Absent or Tyr or Ser or Pro or Asn or Gly
  misc_feature (95)..(95): Absent or Ser or Pro or Gln or Ala or Gly or Asn or Arg
  misc_feature (96)..(96): Absent or Ser or Gln or His or Asn
  misc_feature (97)..(97): Absent or Val or Arg or Pro or Thr or Ala or Ser or His or Glu or Asn
  misc_feature (98)..(98): Absent or Gly or Ser or Leu or Gln or Asp
  misc_feature (99)..(99): Absent or Leu or Ser or Gly or Ala
  misc_feature (100)..(100): Absent or Gln or Ser or Pro
  misc_feature (101)..(101): Absent or Arg or Ser or Pro or Gly or Asn
  misc_feature (102)..(102): Absent or Gln or Thr or Pro or Ser or Arg or His
  misc_feature (103)..(103): Absent or Ser or Asn or Ala or Pro or Gly or Met or Arg or Thr
  misc_feature (104)..(104): Absent or Ser or His or Leu or Lys or Pro or Asn
  misc_feature (105)..(105): Absent or Gly or Asp or Ser or Pro or Ile or Asn
  misc_feature (106)..(106): Absent or Ser or Pro or Gln or Glu or Asp or Ala
  misc_feature (107)..(107): Absent or Ser or Asn or Gln or Arg or Phe or Thr or Leu or Ala
  misc_feature (108)..(108): Absent or Phe or Arg or Gly or Ser or Thr or Val or Leu or Pro or Ala
  misc_feature (109)..(109): Absent or Gly or Ser or Thr or Pro or Arg or Asn
  misc_feature (110)..(110): Absent or Glu or Asn or Ala or Ser or Pro or Arg or Lys
  misc_feature (111)..(111): Absent or Ser or Met or Glu or Pro or Arg or Trp or Ala or Asp
  misc_feature (112)..(112): Absent or Ser or Asp or Leu or Ala or Pro or His or Thr or Gln
  misc_feature (113)..(113): Absent or Leu or Glu or Ser or Pro or Ala or Arg or His or Thr or Asn
  misc_feature (114)..(114): Absent or Ser or Val or Ala or Met or Pro or Arg
  misc_feature (115)..(115): Absent or Gly or Phe or Ser or Leu or Ala or Arg or Pro or Asn or Ile
  misc_feature (116)..(116): Absent or Glu or Gly or Gln or Ser or Ala or His or Pro
  misc_feature (117)..(117): Absent or Tyr or Arg or Ser or Val or Pro or Glu
  misc_feature (118)..(118): Absent or Tyr or Ala or Leu or Ser or Pro or Arg
  misc_feature (119)..(119): Met or Absent or Ala or Ser or Pro or Thr or Arg or Val
  misc_feature (120)..(120): Tyr or Absent or Pro or Gly or Ala or Ser
  misc_feature (121)..(121): Ala or Absent or Thr or Val or Gly or Pro or Cys
  misc_feature (122)..(122): Thr or Absent or Leu or Ser or Pro or Arg or Ala or Asn
  misc_feature (123)..(123): Thr or Absent or Ser or Gly or Pro or Leu or Asn
  misc_feature (124)..(124): Met or Absent or Thr or Asn or Asp or Ser or Ala or Arg or Pro
  misc_feature (125)..(125): Asp or Absent or Thr or Gly or His or Pro or Leu or Tyr or Ala or Gln
  misc_feature (126)..(126): Ala or Absent or Leu or Gly or Pro or Ser or Arg
  misc_feature (127)..(127): Ala or Absent or Ser or Thr or Val or Cys or Gln or Asn
  misc_feature (128)..(128): Val or Absent or Asn or Met or Pro or Ser or Arg or Gln or Ala
  misc_feature (129)..(129): Ala or Absent or Glu or Gly or Ser or Pro or Thr or Arg or Gln or Asn
  misc_feature (130)..(130): Ser or Absent or Ile or Val or Tyr or Gln or Pro or Thr
  misc_feature (131)..(131): Pro or Absent or Asp or Arg or Gln or Ala or Ser or Val or Gly or Ile
  misc_feature (132)..(132): Ala or Absent or Gly or Phe or Ser or Arg or Pro or Gln or Asn or Thr
  misc_feature (133)..(133): Val or Absent or Phe or Pro or Thr or Ala or Ser or Arg or Gln or Glu
  misc_feature (134)..(134): Thr or Absent or Gly or Ser or Pro
  misc_feature (135)..(135): Arg or Absent or Tyr or Trp or Ala or Pro or Leu or Thr or Val
  misc_feature (136)..(136): Leu or Absent or Val or Ala or Pro or Thr or Ser or Gln or Asn
  misc_feature (137)..(137): Glu or Absent or Asn or Pro or Thr or Gly or Ala or Arg or Gln or Ser or Val
  misc_feature (138)..(138): Arg or Absent or Asp or Pro or Ala or Ser or Gln or Val or Thr
  misc_feature (139)..(139): Pro or Absent or Asp or Ala or Leu or Gly or Arg or Ser
  misc_feature (140)..(140): Ala or Absent or Gly or Val or Arg or Thr or Ser or Pro
  misc_feature (141)..(141): Ser or Absent or Phe or Ala or Pro or Arg or Tyr or Ile or Thr
  misc_feature (142)..(142): Thr or Absent or Lys or Glu or Ser or Ala or Arg or Pro
  misc_feature (143)..(143): Arg or Absent or Thr or Val or Ala or Tyr or Gly or Ser or Pro
  misc_feature (144)..(144): Asp or Absent or Gly or Glu or Pro or Ala or Leu or Met
  misc_feature (145)..(145): Ala or Absent or Gly or Gln or Pro or Thr or Glu or Ser
  misc_feature (146)..(146): His or Absent or Gly or Ile or Ala or Val or Thr or Ser or Cys
  misc_feature (147)..(147): Gly or Absent or Pro or Ala or Val or Thr or His
  misc_feature (148)..(148): Absent or Gly or Val or Ala or Ser or Thr
  misc_feature (149)..(149): Absent or Glu or Ser or Pro or Ala or Thr or Val
  misc_feature (150)..(150): Absent or Phe or Thr or Pro
  misc_feature (151)..(151): Absent or Arg or Ala
  misc_feature (152)..(152): Absent or Gly or Met or Ala
  misc_feature (153)..(153): Absent or Lys or Ser or Pro
  misc_feature (154)..(154): Absent or Gly or Thr or Val
  misc_feature (155)..(155): Absent or Gly
  misc_feature (156)..(156): Absent or Gly or Asp or Ala
  misc_feature (157)..(157): Absent or Met or Gly
  misc_feature (158)..(158): Absent or Asp or Ala or Gly
  misc_feature (159)..(159): Absent or Gly or Val
  misc_feature (160)..(160): Absent or Gly or Leu
  misc_feature (161)..(161): Absent or Val or Thr or Pro or Gly
  misc_feature (162)..(162): Absent or Gly or Thr
  misc_feature (163)..(163): Absent or Pro or Gly or Thr or Ala or Glu or Val
  misc_feature (164)..(164): Absent or Pro or Gly or Ala or Glu or Thr or Gln or Asn or Ser
  misc_feature (165)..(165): Absent or Gly or Ala or Ser or Pro or Leu
  misc_feature (166)..(166): Absent or Gly or Thr or Ala or Glu or Pro or Leu or Ser
  misc_feature (167)..(167): Absent or Ser or Leu or Ala or Gly or Met or Thr
  misc_feature (168)..(168): Absent or Ser or Ala or Gly or Glu or Phe or Ile
  misc_feature (169)..(169): Absent or Ser or Ala or Thr or Gly or Asn
  misc_feature (170)..(170): Absent or Gly or Asp or Ala or Asn or Arg
  misc_feature (171)..(171): Absent or Lys or Arg or Gly or Leu or Gln
  misc_feature (172)..(172): Absent or Ser or Thr or Glu or Asp or Gln or Ala
  misc_feature (173)..(173): Absent or Trp or Asp or Glu
  misc_feature (174)..(174): Absent or Ala or Tyr or Phe
  misc_feature (175)..(175): Absent or Gln or Phe or Ile or Met or Tyr
  misc_feature (176)..(176): Phe or Absent or Gln or Arg or Ser or Ala or Leu or Thr
  misc_feature (177)..(177): Asp or Thr or Absent or Glu or Ala or Ser or Gln
  misc_feature (181)..(181): Leu or Tyr or Absent or Phe or Ile
  misc_feature (183)..(183): Leu or Absent or Ala or Met or Ile or Val
  misc_feature (187)..(187): Ala or Leu or Ser or Absent or Met
  misc_feature (189)..(189): Val or Ile or Thr or Absent or Leu or Ala
  misc_feature (193)..(193): Ser or Absent or Leu or Ala or Asn
  misc_feature (194)..(194): Gly or Glu or Absent or Asn or Ser
  misc_feature (195)..(195): Asp or Ala or Absent or Glu or Ser or Gly or Val or Gln
  misc_feature (196)..(196): Leu or Thr or Ala or Absent or Lys or Glu or Asp or Ser or Phe
  misc_feature (197)..(197): Leu or Cys or Absent or Gln or Ala or Phe or Arg or Ser
  misc_feature (198)..(198): Ala or Absent or Thr or Ser or Val or Arg or Pro or Asp or Glu
  misc_feature (199)..(199): Absent or Asp or Leu or Ser
  misc_feature (200)..(200): Absent or Gly
  misc_feature (201)..(201): Absent or Ser or Ala or Gly
  misc_feature (202)..(202): Absent or Gly or Glu
  misc_feature (203)..(203): Absent or Gly
  misc_feature (204)..(204): Absent or Ala or Ser
  misc_feature (205)..(205): Absent or Glu or Gly
  misc_feature (207)..(207): Absent or Thr or Pro or Leu or Ser or His or Phe
  misc_feature (208)..(208): Absent or Asp or Glu or Pro
  misc_feature (209)..(209): Absent or Asp or Leu or Lys or Gly or Asn or Ser
  misc_feature (210)..(210): Absent or Gly or Ser or Asp or Glu or His
  misc_feature (214)..(214): Absent or Asn or Asp or Glu or Arg or Ala or Lys or Ser
  misc_feature (216)..(216): Glu or Asn or Absent or Gly or Pro or Thr or Lys
  misc_feature (218)..(218): Glu or Leu or Met or Absent or Gly or Ile or His
  misc_feature (221)..(221): Gly or Ala or Met or Absent or Val or Glu or Asp
  misc_feature (222)..(222): Arg or Ala or Pro or Absent or Ser or Lys or Gly
  misc_feature (223)..(223): Ser or Asp or Glu or Absent or Ala or Asn or Gly or His or Thr
  misc_feature (224)..(224): Val or Glu or Asp or Absent or Met or Arg or Asn or His or Ala or Gln
  misc_feature (225)..(225): Asn or Ser or Absent or Leu or Arg or Pro or Thr or Val
  misc_feature (226)..(226): Absent or Glu or Gly or Val or Ser or Asn
  misc_feature (227)..(227): Absent or Ala or His
  misc_feature (228)..(228): Absent or Arg or Thr
  misc_feature (229)..(229): Absent or His
  misc_feature (230)..(230): Absent or Asn
  misc_feature (231)..(231): Absent or Pro
  misc_feature (232)..(232): Absent or Thr
  misc_feature (233)..(233): Absent or His
  misc_feature (234)..(234): Absent or Arg
  misc_feature (235)..(235): Absent or Ile or Val or Met
  misc_feature (236)..(236): Absent or Ala or Ser or Phe or Thr or Asp
  misc_feature (237)..(237): Absent or Ser or Arg or Ala or Asp or Asn or Met or Val or Leu
  misc_feature (238)..(238): Absent or Arg or Ser or Gln or Leu or Ala or Gly or Val or Pro or Asp or Lys
  misc_feature (239)..(239): Gly or Asp or Arg or Absent or Ser or Leu or His or Val
  misc_feature (240)..(240): Ala or Ser or Leu or Absent or Val or Arg or Asp or Asn or Glu
  misc_feature (241)..(241): Gly or Asp or Ser or Absent or Arg or Pro or Gln or Lys
  misc_feature (242)..(242): Thr or Ser or Absent or Leu or Glu or Gly or Asp or Val
  misc_feature (243)..(243): Arg or Ser or Absent or Val or Asn or Gly or Thr or Glu or Ile or Asp
  misc_feature (244)..(244): Thr or Ala or Gly or Absent or Ser or Phe or Glu or His or Gln or Asp or Tyr or Leu or Val
  misc_feature (245)..(245): Arg or Ser or Thr or Absent or Gly or Ala or Lys or Leu or Val
  misc_feature (247)..(247): Arg or Glu or Absent or Asp or Ser or Gln or Ala
  misc_feature (248)..(248): Ala or Thr or Ser or Absent or Leu or Phe or Asp or Arg or Gly
  misc_feature (251)..(251): Ser or Absent or Leu
  misc_feature (252)..(252): Absent or Cys
  misc_feature (253)..(253): Absent or Val
  misc_feature (254)..(254): Absent or Tyr
  misc_feature (255)..(255): Absent or Arg
  misc_feature (256)..(256): Absent or Leu
  misc_feature (257)..(257): Absent or Leu
  misc_feature (258)..(258): Absent or Gly
  misc_feature (259)..(259): Absent or His
  misc_feature (261)..(261): Lys or Arg or Absent or Gln or Tyr or Asp
  misc_feature (263)..(263): Trp or Absent or Tyr or Arg or Lys
  misc_feature (264)..(264): Ile or Val or Absent or Ser or Asp or Glu
  misc_feature (266)..(266): Gln or Gly or Absent or Tyr or Asn
  misc_feature (267)..(267): Ala or Cys or Absent or Ser or Val or Phe
  misc_feature (271)..(271): Asp or Phe or Absent or Ser or Glu or Met or His or Asn or Gly
  misc_feature (275)..(275): Asp or Absent
  misc_feature (276)..(276): Ala or Absent
  misc_feature (277)..(277): Ser or Absent
  misc_feature (278)..(278): Ala or Pro or Absent or Glu or Val or Ile or Met
  misc_feature (280)..(280): Gly or Absent or Ser
  misc_feature (284)..(284): Val or Ile or Absent
  misc_feature (285)..(285): Arg or Tyr or Absent or His or Trp or Phe or Leu
  misc_feature (286)..(286): Gly or Absent or Pro or Asp or Asn or Ser
  misc_feature (287)..(287): Glu or Met or Absent or Ile or Asn or Leu or Pro or Ser
  misc_feature (289)..(289): Phe or Pro or Absent or Ser or Val or Met or Ile or Ala or Gly or Thr or Arg
  misc_feature (290)..(290): Glu or Tyr or Absent or Asp or Asn or Gly or Ser
  misc_feature (291)..(291): Asp or Val or Absent or Gly or Pro or Ser or Leu
  misc_feature (292)..(292): Absent or Trp or X
  misc_feature (293)..(293): Absent or Thr or Ser
  misc_feature (294)..(294): Absent or Val or Met
  misc_feature (295)..(295): Absent or Cys
  misc_feature (296)..(296): Absent or Ser or Ala or Thr
  misc_feature (297)..(297): Absent or Val or Asp or Thr
  misc_feature (298)..(298): Absent or Leu or Val or Met or Phe or Ser
  misc_feature (299)..(299): Leu or Gln or Absent or Pro or Asn or Ser or Ala or Val
  misc_feature (300)..(300): Val or Glu or Absent or Lys or Ser or Arg or Gly or Ile
  misc_feature (303)..(303): Lys or Arg or Absent or Asp or Asn or Glu
  misc_feature (308)..(308): Ala or Glu or Arg or Val or Absent or Thr or Met or Ser
  misc_feature (309)..(309): Gln or Ser or Thr or Ala or Asp or Absent or Glu
  misc_feature (311)..(311): Leu or Lys or Absent or Arg or Val or Gln or His or Glu
  misc_feature (312)..(312): Asn or Ala or Ser or Absent or Arg or Thr or Met
  misc_feature (313)..(313): Asp or Val or Absent or Gly or Ser or Asn
  misc_feature (314)..(314): Absent or Asp or Asn
  misc_feature (315)..(315): Absent or Pro
  misc_feature (316)..(316): Pro or Thr or Ala or Absent or Gly or Asp or His or Ile or Leu
  misc_feature (318)..(318): Ile or Ala or Glu or Absent or Gly or Asp or Asn or Ser or Thr
  misc_feature (319)..(319): Ala or Pro or Ser or Absent or Gly or Leu
  misc_feature (323)..(323): Ala or Val or Absent or Gly
  misc_feature (324)..(324): Leu or Ile or Val or Absent or Ser
  misc_feature (326)..(326): Val or Ile or Absent
  misc_feature (327)..(327): Asp or Absent or Asn
  misc_feature (329)..(329): Arg or Tyr or Absent or Ser or Asn or Ala or Lys or Met or Pro
  misc_feature (330)..(330): Thr or Asn or Ser or Absent or Gly or Val or Ile or Phe or Met
  misc_feature (332)..(332): Val or Pro or Ala or Absent or Leu or Thr or Ser or Asn or His
  misc_feature (333)..(333): Phe or Ser or Thr or Absent or Leu or His or Ala
  misc_feature (335)..(335): Ala or Lys or Absent or Gln or Arg or Val or Glu or His
  misc_feature (337)..(337): Leu or Absent or Cys or Met
  misc_feature (338)..(338): Asp or Gln or Absent or Glu or Lys or Met or Val or Leu
  misc_feature (339)..(339): Asp or Ile or Asn or Ser or Ala or Gln or Absent or Glu
  misc_feature (340)..(340): Leu or Gly or Arg or Ser or Lys or Ile or Val or Absent
  misc_feature (342)..(342): Arg or Leu or His or Phe or Absent or Val or Gln or Glu
  misc_feature (345)..(345): Cys or Ser or Absent or Ala or Val or Leu or Met or Thr
  misc_feature (347)..(347): Ala or Ser or Met or Thr or Absent or Glu or Asp or Gly
  misc_feature (348)..(348): Ala or Cys or Absent or Ser or Phe or Trp
  misc_feature (349)..(349): Pro or Ile or Absent or Gln or Val or Leu or Ser
  misc_feature (350)..(350): Asn or Ser or Thr or Absent or Glu or Val or Asp or Ala
  misc_feature (351)..(351): Thr or Val or Ser or Absent or Ala or Ile
  misc_feature (352)..(352): Arg or Glu or Lys or Thr or Absent or Asn or Ser or Asp
  misc_feature (353)..(353): Ala or Glu or Asp or Absent or Val or Ile
  misc_feature (354)..(354): Lys or Val or Ile or Absent or Gly or Thr or Ala or Ser or Leu
  misc_feature (355)..(355): Cys or Val or Absent or Leu or Ala or Ile
  misc_feature (356)..(356): Absent or Asp or Met
  misc_feature (357)..(357): Absent or Leu
  misc_feature (358)..(358): Absent or Ala or Val
  misc_feature (359)..(359): Ala or Asp or Absent or Gln or Arg or Leu
  misc_feature (361)..(361): Leu or Ile or Absent
  misc_feature (366)..(366): Ser or Cys or Ala or Thr or Absent
  misc_feature (367)..(367): Asp or Asn or Ser or Glu or Ile or Absent or Gly
  misc_feature (368)..(368): Arg or His or Gln or Asn or Absent or Leu
  misc_feature (372)..(372): Ser or Ala or Pro or Absent
  misc_feature (373)..(373): Val or Ala or Absent
  misc_feature (374)..(374): Lys or Pro or Ser or Ile or Glu or Val or Met or Absent or Arg
  misc_feature (376)..(376): Val or Gly or Arg or Asp or Ala or Absent or Ser
  misc_feature (377)..(377): Asp or Glu or Asn or Absent or Thr or Ser
  misc_feature (378)..(378): Asp or Glu or Ala or Absent
  misc_feature (379)..(379): Ala or Asp or Glu or Thr or Ile or Absent or Leu
  misc_feature (380)..(380): Glu or Leu or Phe or Met or Absent or Ile or Val
  misc_feature (381)..(381): Leu or Val or Phe or Arg or Ala or Absent or Ile
  misc_feature (382)..(382): Ala or Ser or Pro or Glu or Thr or Absent or Val
  misc_feature (383)..(383): Arg or Met or Ile or Thr or Absent or Lys
  misc_feature (385)..(385): Val or Lys or Gln or Arg or Glu or Met or Ser or Leu or Absent or Ile or Thr
  misc_feature (386)..(386): Ala or Glu or Asp or Val or Thr or Absent or Gly or Ser
  misc_feature (387)..(387): Met or Arg or Phe or Cys or Ser or Glu or Asn or Thr or Lys or Absent or Ile
  misc_feature (388)..(388): Asp or Absent
  misc_feature (390)..(390): Glu or Asp or Val or Asn or Arg or Ser or Thr or Absent or Ile or Lys
  misc_feature (392)..(392): Leu or Met or Absent or Gln or Phe
  misc_feature (393)..(393): Leu or Lys or Arg or Ser or Thr or Absent
  misc_feature (394)..(394): Ala or Asp or Glu or Lys or Leu or Thr or Absent
  misc_feature (395)..(395): Asn or Cys or Glu or Leu or Ser or Absent or Ala
  misc_feature (397)..(397): Arg or Gly or Asp or Absent or His or Gln or Asn
  misc_feature (399)..(399): Cys or Ile or Val or Ala or Leu or Ser or Absent
  misc_feature (400)..(400): Val or Leu or Absent or Ile or Ala
  misc_feature (401)..(401): Phe or Leu or Val or Ile or Absent
  misc_feature (405)..(405): His or Ser or Met or Cys or Absent or Arg or Phe
  misc_feature (406)..(406): Leu or Ile or Val or Absent
  misc_feature (407)..(407): Thr or Ser or Lys or Asn or Absent or Asp or Glu
  misc_feature (410)..(410): Asn or Leu or Absent or Ile
  misc_feature (420)..(420): Ala or Val or Absent or Ser or Ile
  misc_feature (424)..(424): Val or Ile or Absent or Thr or Arg or Phe or Ser or Asn or Met or His
  misc_feature (426)..(426): Asp or Absent or Glu or Gly or Arg or Lys
  misc_feature (427)..(427): Ile or Leu or Absent or Val or Phe
  misc_feature (430)..(430): Arg or Absent or Gln or Lys
  misc_feature (436)..(436): Tyr or Absent or Lys or Ser or His or Asn
  misc_feature (440)..(440): Gly or Absent or Arg or His or Lys or Ile or Asp or Val or Asn
  misc_feature (441)..(441): Arg or Absent or Asp or Glu or Val
  misc_feature (445)..(445): Arg or Absent or Ser or Met or Val or Ala or Ile
  misc_feature (446)..(446): Val or Absent or Cys or Ile or Asn
  misc_feature (447)..(447): Absent or Asn
  misc_feature (448)..(448): Ile or Absent or Leu or Val or Thr
  misc_feature (449)..(449): Trp or Absent or Val or Ile
  misc_feature (450)..(450): Ala or Absent or Arg or Val or Lys or Ile
  misc_feature (451)..(451): Gly or Absent or Phe or Met or Cys or Leu or Val or Lys
  misc_feature (452)..(452): Glu or Absent or Gly or Cys or Asp or Met or Asn or Lys or Pro
  misc_feature (453)..(453): Gly or Absent or Leu or Ile or Asp or Asn or Lys
  misc_feature (454)..(454): Glu or Absent or Asp or Gly or Gln or Lys
  misc_feature (457)..(457): Met or Absent or Tyr or Leu or Arg or Trp or Phe
  misc_feature (463)..(463): Val or Absent or Gly or Ala or Asp or Thr
  misc_feature (464)..(464): Val or Absent or Lys or Asn or Ser or Ala or Asp
  misc_feature (467)..(467): Ala or Absent or His or Cys or Tyr or Arg or Gln or Thr
  misc_feature (471)..(471): Cys or Absent or Pro or Ala or Ser
  misc_feature (473)..(473): Glu or Absent or Ser or Asn or Phe or Val or Ile
  misc_feature (474)..(474): Ser or Absent or Leu or Arg or Phe or Pro or Ala
  misc_feature (475)..(475): Ala or Absent or Leu or Asp or Ser or Asn or Ile
  misc_feature (476)..(476): Gly or Absent or Asn or Ser or Ala or Thr or Trp
  misc_feature (477)..(477): Val or Absent or Gly or Lys or Ala or Asn or Arg or Ser
  misc_feature (478)..(478): Glu or Absent or Pro or Thr or Asp or Gly or Asn
  misc_feature (479)..(479): Asp or Absent or Ser or Pro or Asn or Thr or Ala
  misc_feature (480)..(480): Ile or Absent or Thr or Ser or Pro
  misc_feature (481)..(481): Pro or Absent or Ile or Val or Gly or Ser or Leu or Phe
  misc_feature (482)..(482): Pro or Absent or Ser or Tyr or Asn or Lys or Glu
  misc_feature (483)..(483): Thr or Absent or Ile or Ser or Pro or Phe or Leu
  misc_feature (484)..(484): Pro or Absent or Ser or Asp or Tyr or Asn or His or Thr or Cys
  misc_feature (485)..(485): Pro or Absent or Ser or Asn or His or Arg or Ala or Gln or Lys
  misc_feature (486)..(486): Arg or Absent or Pro or Gly or Lys or Thr or Ser
  misc_feature (487)..(487): Tyr or Absent or Leu or Arg or Lys or Asn
  misc_feature (488)..(488): Ile or Absent or Arg or Met or Leu or Gly or Ala or Thr or Val
  misc_feature (489)..(489): Glu or Absent or Phe or Ser or Gln or Asn
  misc_feature (490)..(490): Absent or Pro or Lys
  misc_feature (491)..(491): Absent or Glu or Pro
  misc_feature (492)..(492): Absent or Thr or Gly or Lys or Ile
  misc_feature (493)..(493): Absent or Leu or Gln or Ile or Phe
  misc_feature (494)..(494): Absent or Thr or Asn or Pro or Ala
  misc_feature (495)..(495): Absent or Ser or Gln or Arg or Pro or Thr or Gly or Ala
  misc_feature (496)..(496): Absent or Trp or Met or Thr or Leu or Val or Pro or Ala
  misc_feature (497)..(497): Absent or Ala or Val or Gln or Arg or Pro
  misc_feature (498)..(498): Absent or Thr or Gly or Glu or Ala or Ser or Leu or Phe
  misc_feature (499)..(499): Absent or Gln or Ser or Leu or Pro or Thr or Asn
  misc_feature (500)..(500): Absent or Glu or Ser or Ala or Lys or Asn
  misc_feature (501)..(501): Glu or Absent or Ser or Asp or His
  misc_feature (502)..(502): Thr or Absent or Glu or Asn or Pro or Ser or Phe or Val
  misc_feature (503)..(503): Asp or Absent or Val or Ile or Thr or Met or Gly or Glu or Arg
  misc_feature (504)..(504): Lys or Absent or Gly or Tyr or Asp or Glu or Ile or Val
  misc_feature (505)..(505): His or Absent or Arg or Pro or Ser or Ala or Asn or Asp or Val or Ile
  misc_feature (506)..(506): Trp or Absent or Ser or Thr or Asn or Tyr or Phe or His
  misc_feature (507)..(507): Glu or Absent or Arg or Leu or Met or Val or Ser or Thr or Ala or Pro
  misc_feature (508)..(508): Tyr or Absent or Gly or Asp or Ser or Glu or Arg or Ala
  misc_feature (509)..(509): Ser or Absent or Pro or Glu or Ala or Arg
  misc_feature (510)..(510): His or Absent or Ala or Thr or Asn or Val or Ser or Lys
  misc_feature (511)..(511): Ala or Absent or Val or Ser or Pro or Leu
  misc_feature (512)..(512): Ser or Absent or Ile or Phe or Leu or Ala
  misc_feature (513)..(513): Tyr or Absent or Ala or Gly or Pro or His or Gln or Leu or Phe or Thr or Ser or Glu
  misc_feature (514)..(514): Arg or Absent or Ser or Leu or Pro or Gly
  misc_feature (515)..(515): Met or Absent or Pro or Glu or Gly or Asp
  misc_feature (516)..(516): Asp or Absent or Leu or His or Pro or Cys or Tyr
  misc_feature (517)..(517): Lys or Absent or Gln or Asn or Glu or Val
  misc_feature (519)..(519): Lys or Absent or Glu or Gly or Asn or Tyr or Ser or Thr
  misc_feature (520)..(520): Ser or Absent or Arg or Asp or Gln
  misc_feature (521)..(521): Pro or Absent or Gln or Arg or Leu or Gly or His
  misc_feature (522)..(522): Leu or Absent or Gly or Lys or Pro or His or Thr or Asn or Ser
  misc_feature (523)..(523): Ile or Absent or Pro or Ser or Leu or Met
  misc_feature (524)..(524): Ser or Absent or Phe or Ala or Leu or Pro or Thr or Val or Met
  misc_feature (525)..(525): Gly or Absent or Ile or Asn or Ser or Ala or Met or Val or Leu
  misc_feature (526)..(526): Lys or Absent or Gly or Asn or Ser or Glu or Asp
  misc_feature (527)..(527): Ser or Absent or Tyr or Gly or Ile or Asn
  misc_feature (528)..(528): Thr or Absent or Ser or Glu or Asp or Asn or Ile
  misc_feature (529)..(529): Ser or Absent or Val or Thr or Trp or Arg or Leu or Asp
  misc_feature (530)..(530): Gln or Absent or Ser or Ala or Ile or Met or Val or Leu or Pro or Asp
  misc_feature (531)..(531): Pro or Absent or Val or Leu or Ser or Gln or Phe
  misc_feature (532)..(532): Pro or Absent or Leu or Asp or Ala or Gly or Val or Glu or Asn or Ser
  misc_feature (533)..(533): Asn or Absent or His or Arg or Ser or Ile or Gly
  misc_feature (534)..(534): Asp or Absent or Tyr or Lys or Gln or Gly or His or Leu or Arg or Ile
  misc_feature (535)..(535): His or Absent or Ser or Ala or Leu or Thr
  misc_feature (536)..(536): Ser or Absent or Arg or Gly or Cys or Asn or Lys or Glu
  misc_feature (537)..(537): Glu or Absent or Ser or Phe or Tyr or Cys or Asn or Pro or Ala or Gly
  misc_feature (539)..(539): Ser or Absent or Val or Lys or Ala or Asn or Thr or Arg
  misc_feature (540)..(540): Ile or Absent or Gly or Val or Glu or Ala or Asp or Thr
  misc_feature (541)..(541): Asp or Absent or Asn or Pro or Ala or Glu or Gly or Thr
  misc_feature (542)..(542): Asp or Absent or Lys or Glu or Ala or Thr or Ile or Ser
  misc_feature (543)..(543): Leu or Absent or Pro or Ile or Ala or Thr or Ser or Val
  misc_feature (544)..(544): Val or Absent or Ser or Thr or Gly or Ala or Asp or Pro or His
  misc_feature (545)..(545): Ala or Absent or His or Ser or Phe
  misc_feature (546)..(546): Phe or Absent or Val or Ser or Thr or Ala or Ile or Tyr
  misc_feature (547)..(547): Ala or Absent or Pro or Gln or Ser
  misc_feature (548)..(548): Asn or Absent or Ile or Thr or Ala or Asp or Ser or Gly or Lys
  misc_feature (549)..(549): Gly or Absent or Ala or Ser or Pro or Leu or Val or Glu
  misc_feature (550)..(550): Ser or Absent or Trp or Gly
  misc_feature (551)..(551): Arg or Absent or Ser or Gly or Ala or Asn or Pro
  misc_feature (552)..(552): Thr or Absent or Gly or Ala or Val or Asp or Asn or Ser or Leu
  misc_feature (553)..(553): Gln or Absent or Leu or Thr or Met or Val or Ala or Ser or Arg
  misc_feature (554)..(554): Asn or Absent or Pro or Ser or Thr or Leu or Gly
  misc_feature (555)..(555): Ser or Absent or Glu or Phe or Pro or Val or Ala or Ile
  misc_feature (556)..(556): Thr or Absent or Ala or Val or Met or Gly or Asp
  misc_feature (557)..(557): Thr or Absent or Gly or Ser or Pro or Ala or Ile or Leu or Tyr
  misc_feature (558)..(558): Ser or Absent or Phe or Ala
  misc_feature (559)..(559): Thr or Absent or Gly or Ala or Arg
  misc_feature (560)..(560): Ser or Absent or Leu or Asn or Asp or Cys or Ile or Gly or Val or Phe
  misc_feature (561)..(561): Pro or Absent or Lys or Gly or Val or Ala or Ser or Glu or Asn
  misc_feature (562)..(562): Lys or Absent or Val or Tyr or Phe or Ala or Ser or Asn
  misc_feature (563)..(563): Glu or Absent or Gly or Ser or Asp or Arg or Lys
  misc_feature (564)..(564): Ala or Absent or Gly or Glu or Ser or Gln or Val or Thr or Pro
  misc_feature (565)..(565): Asp or Absent or Ala or Ser or Pro or Leu or Thr
  misc_feature (566)..(566): Val or Absent or Ser or Trp or Cys or Gly or Pro
  misc_feature (567)..(567): Asp or Absent or Lys or Thr or Leu or Met or Ala or Val or Ser
  misc_feature (568)..(568): Asp or Absent or Ala or Gly or Leu or Asn or Thr
  misc_feature (569)..(569): Leu or Absent or Thr or Val or Gly or Asp or Ala or Gln
  misc_feature (570)..(570): Thr or Absent or Leu or Asp or Pro or Asn or Ser or His or Phe or Val
  misc_feature (571)..(571): Asp or Absent or Ser or His or Gln or Arg or Gly or Glu
  misc_feature (572)..(572): Leu or Absent or Val or Ala or Asp or Gly or Met or Asn or Trp
  misc_feature (573)..(573): Tyr or Absent or Pro or Lys or Gln or Arg or Ile or Thr or Asn
  misc_feature (574)..(574): Asp or Absent or Ser or Gln or Pro or Leu or Ala
  misc_feature (575)..(575): Ala or Absent or Thr or Leu or Asp or Ser or Gly or Pro
  misc_feature (576)..(576): Ile or Absent or Thr or Tyr or Glu or Gly or Asp or Lys or Gln or Leu
  misc_feature (577)..(577): Ala or Absent or Ile or Pro or Gln or Thr
  misc_feature (578)..(578): Val or Absent or Gly or Ser or Thr or Ile or Phe
  misc_feature (579)..(579): Ala or Absent or Pro or Ser or Thr or Leu or Gly
  misc_feature (580)..(580): His or Absent or Ser or Leu or Ala or Thr
  misc_feature (581)..(581): Gly or Absent or Phe or Ala or Pro or Ser
  misc_feature (582)..(582): Absent or Pro or Gly or Ser or Val or Leu
  misc_feature (583)..(583): Absent or Tyr or Thr or Met or Ala
  misc_feature (584)..(584): Absent or Lys or Ser or Leu or Pro or His
  misc_feature (585)..(585): Absent or Gly or Ser or Ala
  misc_feature (586)..(586): Absent or Asn or Gln or Lys or Met or Ser or Gly
  misc_feature (587)..(587): Absent or Gln or Arg
  misc_feature (588)..(588): Absent or Glu or Lys or Gly
  misc_feature (589)..(589): Absent or Gly or Val or Glu or Lys or Ala or Thr or Pro
  misc_feature (590)..(590): Absent or Thr or Val or Ile or Asp or Asn or His
  misc_feature (591)..(591): Absent or Ser or Pro or Leu or Ala
  misc_feature (592)..(592): Absent or Val or Gln or Pro or Ile or Ala
  misc_feature (593)..(593): Absent or Gly or Ser or Ala or Asn or Ile
  misc_feature (594)..(594): Absent or Asp or Glu or Gly
  misc_feature (595)..(595): Absent or Val or His or Glu or Gly or Ala or Cys
  misc_feature (596)..(596): Absent or Phe or Gln or His or Ser or Val or Leu
  misc_feature (597)..(597): Absent or Lys or Gln or Arg or Pro
  misc_feature (598)..(598): Absent or Thr or Asn or Trp or Met or Leu
  misc_feature (599)..(599): Absent or Asn
  misc_feature (600)..(600): Absent or Glu
  misc_feature (601)..(601): Absent or Asn
  misc_feature (602)..(602): Absent or Ile
  misc_feature (603)..(603): Absent or Asn
  misc_feature (604)..(604): Absent or Ala
  misc_feature (605)..(605): Absent or Arg
  misc_feature (606)..(606): Absent or Asn
  misc_feature (607)..(607): Absent or Glu
  misc_feature (608)..(608): Absent or Asn
  misc_feature (609)..(609): Absent or Phe or Leu or Ile or Met or Val
  misc_feature (610)..(610): Absent or Asp or Asn or Lys or Glu or Gln
  misc_feature (611)..(611): Absent or Ala or Arg or Leu or Ile or Val
  misc_feature (612)..(612): Absent or Pro or Leu or Val or Ile or Thr
  misc_feature (613)..(613): Absent or Pro or Ser or Thr
  misc_feature (614)..(614): Absent or Tyr or Asp
  misc_feature (615)..(615): Absent or Asn or Gly or Val or Asp
  misc_feature (616)..(616): Absent or Thr or Leu or Pro or Ser or Gln
  misc_feature (617)..(617): Absent or Gln or His or Asn
  misc_feature (618)..(618): Absent or Asp or Glu or Gly or Ser or Thr or Asn
  misc_feature (619)..(619): Absent or Asn or Ile or Thr or Leu or Ser or Pro or Glu
  misc_feature (620)..(620): Absent or Val or Pro or Ser or Asp or Glu
  misc_feature (621)..(621): Absent or Asp or Glu or Val
  misc_feature (622)..(622): Absent or Ser or Pro
  misc_feature (623)..(623): Val or Absent or Lys or Ile or Thr or Arg
  misc_feature (624)..(624): Ser or Absent or Ala or Asn or Tyr or Lys
  misc_feature (625)..(625): Leu or Absent or Ile or Gln
  misc_feature (626)..(626): Lys or Absent or Phe or Ile
  misc_feature (627)..(627): Ser or Absent or Ala or Val
  misc_feature (628)..(628): Val or Absent or Arg or Asp or Gly or Glu
  misc_feature (630)..(630): Ser or Absent or Arg or Lys or Asn or Val or Asp
  misc_feature (633)..(633): Lys or Absent or Glu or Gln or Gly or Arg or Asn
  misc_feature (634)..(634): Leu or Absent or Pro or Met or Asp or Gly or Ala or Ile or Asn
  misc_feature (635)..(635): Thr or Absent or Val or Met or Asn or Arg or Ile or Lys
  misc_feature (636)..(636): Glu or Absent or Ile or Gly or Lys
  misc_feature (637)..(637): Asp or Absent or Val or Ser or Pro or Leu or Thr or Ala
  misc_feature (638)..(638): Asp or Absent or Phe or Gly or Lys or Ser
  misc_feature (639)..(639): Met or Absent or Arg or Thr or Lys or Asn
  misc_feature (640)..(640): Glu or Absent or Ser or Val or Asp or Lys or Thr or Ala or Leu
  misc_feature (641)..(641): Arg or Absent or Leu or Pro or Ser or Phe or Tyr
  misc_feature (642)..(642): Ala or Absent or Ile or Val or Leu or Met
  misc_feature (643)..(643): Asn or Absent or Lys or Pro or Ala or Gln or His
  misc_feature (644)..(644): Leu or Absent or Gln or Ile or Ser or Phe or Asn or His or Lys or Thr
  misc_feature (645)..(645): Leu or Absent or Tyr or Asp or Lys or Asn
  misc_feature (646)..(646): Cys or Absent or Phe or Ile or Pro or Gly or Arg or Ser
  misc_feature (647)..(647): Asn or Absent or Ser or Asp or Thr or Pro or Leu or Met or Ala or Val or Gly
  misc_feature (648)..(648): Ser or Absent or Asp or Gln or Glu or Asn or Arg or Leu
  misc_feature (649)..(649): Leu or Absent or Cys or Gly or Ser or His or Asn
  misc_feature (650)..(650): Gly or Absent or Gln or Ser or Asp or Arg or Lys or Asn
  misc_feature (651)..(651): Ala or Absent or Leu or Ser or Gly or Asn or Val or Ile
  misc_feature (652)..(652): Val or Absent or Leu or Thr or Asn or Ser or Asp or Glu
  misc_feature (653)..(653): Leu or Absent or Asn or Gln or Glu or Asp
  misc_feature (654)..(654): Glu or Absent or Leu or Ile or Phe or Tyr
  misc_feature (655)..(655): Glu or Absent or Val or Ala or Gln or Arg or His or Pro
  misc_feature (656)..(656): Glu or Absent or Phe or Arg or Lys or Gly or Gln
  misc_feature (657)..(657): Ala or Absent or Asp or Glu or Gln or Arg or His or Pro
  misc_feature (658)..(658): Cys or Absent or Glu or Arg or Lys or Ile
  misc_feature (659)..(659): Leu or Absent or Ala or Glu or Asn or Asp
  misc_feature (660)..(660): Ser or Absent or Pro or Arg or Asn
  misc_feature (661)..(661): Glu or Absent or Ala or Leu or Val or Ile
  misc_feature (662)..(662): Glu or Absent or Gly or Asn or Val or Ala or Ser or Thr
  misc_feature (663)..(663): Gln or Absent or Ser or Leu or Pro or Ala
  misc_feature (664)..(664): Arg or Absent or Ala or Gly or Asn or Ser or Val or Pro or Leu or Ile
  misc_feature (665)..(665): Gly or Absent or Val or Pro or Ala or Thr or Ser
  misc_feature (666)..(666): Val or Absent or Asp or Gly or Arg or Ala or Ser
  misc_feature (668)..(668): Tyr or Absent or Asp or Pro or Ser
  misc_feature (669)..(669): Thr or Absent or Asn or Pro or Gln
  misc_feature (670)..(670): Glu or Absent or Lys or Leu or Gln or Ala
  misc_feature (671)..(671): Pro or Absent or Gly or Glu or Arg
  misc_feature (672)..(672): Val or Absent or Phe or Met or Leu
  misc_feature (673)..(673): Leu or Absent or Ser or Glu or Val or Met or Lys
  misc_feature (674)..(674): Leu or Absent or Met or Lys or Trp or Ile or X
  misc_feature (677)..(677): Met or Absent or Lys or Glu or Ser or Arg or Trp
  misc_feature (678)..(678): Phe or Absent or Gln or Ser or Tyr
  misc_feature (679)..(679): Asn or Absent or Leu or Pro or Ala or Ser
  misc_feature (680)..(680): Leu or Absent or Asp or Met or Asn or Tyr or Phe or Cys or Pro
  misc_feature (682)..(682): Val or Absent or Lys or Asn or Glu or Asp
  misc_feature (683)..(683): Thr or Absent or Phe or Ile or His or Val or Ala
  misc_feature (684)..(684): Ser or Absent or Thr or Pro or Leu
  misc_feature (685)..(685): Lys or Absent or Asp or Glu or Gly or Arg or Asn
  misc_feature (686)..(686): Trp or Absent or Gly or Asn or Thr or Lys or Arg
  misc_feature (688)..(688): Val or Absent or Asn or Ala or Gln or Glu or Asp
  misc_feature (689)..(689): Ala or Absent or Leu or Asp or Tyr or Asn or Ser
  misc_feature (690)..(690): Asp or Absent or Phe or Leu or Ala or Gly or Asn or Glu or Ser
  misc_feature (691)..(691): Ala or Absent or Leu or Gly or Phe or Tyr or Val or Ile or Asn
  misc_feature (692)..(692): Val or Absent or His or Ser or Ala or Ile or Met
  misc_feature (694)..(694): Ala or Absent or Gly or Ser or Asp or Arg or Asn
  misc_feature (695)..(695): Phe or Absent or Leu or Val or Ser or Pro
  misc_feature (696)..(696): Asn or Absent or Gly or Met or Gln or Phe or Val or Tyr or Leu
  misc_feature (697)..(697): Thr or Absent or Asp or Pro or Ala or Arg
  misc_feature (698)..(698): Arg or Absent or Asp or Asn or Gln or Ser or Lys or His or Gly
  misc_feature (699)..(699): Arg or Absent or Thr or Glu or Gln or Asn or Ile or Lys or Val or Leu
  misc_feature (700)..(700): Arg or Absent or Ser or Asn or His
  misc_feature (701)..(701): Ala or Absent or Met or Leu or Gln or Val or Ile or Thr or Arg or Gly
  misc_feature (702)..(702): Gln or Absent or His or Tyr or Pro or Asp or Glu or Gly or Val or Thr or Ser
  misc_feature (703)..(703): Leu or Absent or Val or Ala or Ser or Asp or Asn or Thr or Pro
  misc_feature (704)..(704): Ala or Absent or Asp or Lys or His or Gly or Arg or Asn or Ser
  misc_feature (705)..(705): Asp or Absent or Val or Glu or Arg or Gly or Ala or Asn or Tyr
  misc_feature (706)..(706): Ala or Absent or Arg or Ser or Thr or Tyr or Val or Pro or Gly
  misc_feature (707)..(707): Ala or Absent or Asn or Gln or Arg or Lys or Ser
  misc_feature (708)..(708): Ala or Absent or Pro or Glu or His or Thr or Ser or Leu or Gln or Ile
  misc_feature (709)..(709): Lys or Absent or Gln or Ser or Thr or Pro or His
  misc_feature (710)..(710): Leu or Absent or Phe or Pro or Glu or Ile or Ser or Gln
  misc_feature (711)..(711): Ala or Absent or Leu or Glu or Val or Pro or Gln or Ile or Ser
  misc_feature (712)..(712): Glu or Absent or Lys or Asp or Arg or Gly or Leu or Met or Pro or Ala or Thr or Tyr
  misc_feature (713)..(713): Ile or Absent or Ser or Arg or Leu or Pro or Trp or Ala
  misc_feature (714)..(714): Ala or Absent or Asn or Gln or Gly or Ser or Arg or Pro or Thr
  misc_feature (715)..(715): Glu or Absent or Pro or Ile or Gln or Ser or Ala or Thr or Asn
  misc_feature (716)..(716): Leu or Absent or Gln or Ala or Ser or Gly
  misc_feature (717)..(717): Lys or Absent or Leu or Val or Asp or Asn or Ser or Gln or Thr
  misc_feature (718)..(718): Glu or Absent or Phe or Asp or Leu or Arg or Asn or His or Thr or Met or Ser or Ile
  misc_feature (719)..(719): Ala or Absent or Asn or Leu or Val or Glu or Ser or Thr or Ile or Tyr or Pro or Gly
  misc_feature (720)..(720): Lys or Absent or Pro or Thr or Ala or Asn or Glu or Gln
  misc_feature (721)..(721): Arg or Absent or Ser or Ile or Gly or Leu or Pro or Lys or Val
  misc_feature (722)..(722): Ile or Absent or Gln or Asp or Arg or Tyr or Asn or Val or Ser
  misc_feature (723)..(723): Glu or Absent or Asn or Pro or Ser or Val or Ile or Ala or Gly or Tyr
  misc_feature (724)..(724): Thr or Absent or Ile or Asn or Gly or Val or Arg or Ser or Pro
  misc_feature (725)..(725): Glu or Absent or Val or Leu or Ala or Gly or Gln or Asp
  misc_feature (726)..(726): Arg or Absent or His or Asn or Leu or Val or Gly or Thr
  misc_feature (727)..(727): Ile or Absent or Gln or Thr or Ala or Asn or Phe or Leu or Ser
  misc_feature (728)..(728): Glu or Absent or Gln or Pro or Ala or Asp or Asn or Lys or Arg
  misc_feature (729)..(729): Ala or Absent or Thr or Gly or Glu or Lys or Arg or Leu or Ser
  misc_feature (730)..(730): Glu or Absent or Val or Met or Phe or Ser or Pro or Leu or His
  misc_feature (731)..(731): Glu or Absent or Leu or Val or Ser or Tyr or His or Cys or Gly
  misc_feature (732)..(732): Arg or Absent or Lys or Gly or His or Met or Ala or Val or Asn or Ser
  misc_feature (733)..(733): Ser or Absent or Asp or Val or X or Ala or Leu or Phe
  misc_feature (734)..(734): Arg or Absent or Gln or Pro or Ser or Ala or Tyr or Asn
  misc_feature (735)..(735): Arg or Absent or Ile or Ser or Ala or Val or Gly or Met or Thr or Pro
  misc_feature (736)..(736): Arg or Absent or Pro or Val or His or Asn or Ser or Ala
  misc_feature (737)..(737): Arg or Absent or Leu or Ala or Asn or Lys or Ser or Tyr or Cys or Gly
  misc_feature (738)..(738): Glu or Absent or Lys or Arg or Tyr or Asn
  misc_feature (739)..(739): Glu or Absent or Arg or Lys or Asp or Asn or Val or Gly
  misc_feature (740)..(740): Lys or Absent or Ile or Ser or Asn or Gly
  misc_feature (741)..(741): Glu or Absent or Pro or Ile or Ser or Phe or Gly or Arg or Lys or Asp or Val
  misc_feature (742)..(742): Arg or Absent or Pro or Gly or Met or Thr or Ile or Lys or Asp or Ala or Glu
  misc_feature (743)..(743): Ala or Absent or Ile or Val or Asp or Gln or Trp or Arg or Phe
  misc_feature (744)..(744): Ala or Absent or Gly or His or Val or Asn
  misc_feature (745)..(745): Asp or Absent or His or Pro or Ser or Thr or Ala or Tyr
  misc_feature (746)..(746): Asp or Absent or Arg or Pro or Ser or Ala or Thr
  misc_feature (747)..(747): Leu or Absent or Asp or Glu or Ser or Ala or Thr or Cys or Arg or Val
  misc_feature (748)..(748): Ile or Absent or Val or Arg or His or Met or Thr or Asn or Gly or Ser or Ala
  misc_feature (749)..(749): Arg or Absent or Ser or Gly or His or Lys or X or Thr or Ala or Val or Asn
  misc_feature (750)..(750): Ala or Absent or Arg or Gly or Ile or Met or Thr or Lys or Asn or Ser or Pro
  misc_feature (751)..(751): Ala or Absent or Leu or Val or Ser or Asn or Thr or Pro
  misc_feature (752)..(752): Glu or Absent or Asp or Lys or Ser or Leu or Met or Ala or Ile
  misc_feature (753)..(753): Glu or Absent or Thr or Phe or Val or Ala or Leu
  misc_feature (754)..(754): Arg or Absent or Ser or Thr or Ala or Gly
  misc_feature (755)..(755): Val or Absent or Lys or Arg or Glu or Gly or Thr or Pro or Ser
  misc_feature (756)..(756): Glu or Absent or Asp or Gly or Ser or Thr or Ile or Tyr or Ala
  misc_feature (757)..(757): Gln or Absent or Ser or Gly or Arg or Cys or Thr or Met or Pro or Glu
  misc_feature (758)..(758): Phe or Absent or Arg or Ala or Lys or Leu or Pro or Ser or Asn
  misc_feature (759)..(759): Arg or Absent or Phe or Asn or Val or Asp or Gln or Glu
  misc_feature (760)..(760): Glu or Absent or Gly or Val or Gln or Pro or Arg or Phe or Cys
  misc_feature (761)..(761): Glu or Absent or His or Asp or Ser or Pro or Asn or Tyr or Arg or Thr
  misc_feature (762)..(762): Arg or Absent or Gly or Asn or Lys or Gln or Ser
  misc_feature (763)..(763): Val or Absent or Leu or Arg or Met or Ser or Phe or Pro
  misc_feature (764)..(764): Lys or Absent or Gln or Leu or Glu or Pro or Ala or Ser
  misc_feature (765)..(765): Leu or Absent or Val or His or Arg or Tyr or Ala or Pro or Ser or Ile
  misc_feature (766)..(766): Cys or Absent or Val or Ala or Gly or Asp or Gln
  misc_feature (767)..(767): Glu or Absent or Pro or Asp or Ser or Leu or His or Asn or Gly
  misc_feature (768)..(768): Asp or Absent or Ser or Arg or Leu or Tyr or Glu
  misc_feature (769)..(769): Ser or Absent or Lys or Val or Asp or Tyr or Ala or Gln or Met
  misc_feature (770)..(770): Glu or Absent or Pro or Gly or Lys or Asp or Asn
  misc_feature (771)..(771): Arg or Absent or Asn or Ser or Gly or Lys or Asp or Ala
  misc_feature (772)..(772): Ala or Absent or Lys or Thr or Gln or Leu or Met or Asn or Asp
  misc_feature (773)..(773): Ala or Absent or Glu or Asp or Thr or Ile or Leu or Pro or Tyr or Phe or Arg
  misc_feature (774)..(774): Gln or Absent or Leu or Thr or Asn or Gly or Lys
  misc_feature (775)..(775): Leu or Absent or Thr or Tyr or Ser or Gly or Glu or Lys
  misc_feature (776)..(776): Arg or Absent or Leu or Phe or Gln or Pro or Ser or Ile or Lys or Glu or Asn or Thr
  misc_feature (777)..(777): Absent or Ser
  misc_feature (778)..(778): Absent or Ser
  misc_feature (779)..(779): Absent or Val or Met
  misc_feature (780)..(780): Absent or Asn
  misc_feature (781)..(781): Absent or Thr or Ala
  misc_feature (782)..(782): Absent or Ser or Ala
  misc_feature (783)..(783): Absent or Cys or Ser
  misc_feature (784)..(784): Absent or Met or Ser or Thr
  misc_feature (785)..(785): Absent or Tyr or Ser
  misc_feature (786)..(786): Absent or Gly
  misc_feature (787)..(787): Absent or Ile
  misc_feature (788)..(788): Absent or Gly or Val
  misc_feature (789)..(789): Absent or Ser or Lys
  misc_feature (790)..(790): Absent or Leu or Val
  misc_feature (791)..(791): Absent or Glu or Gly or Val or Ala
  misc_feature (792)..(792): Absent or Asp or Ile or Glu
  misc_feature (793)..(793): Absent or Gln or Lys
  misc_feature (794)..(794): Absent or His or Gly or Asp
  misc_feature (795)..(795): Absent or Val or Pro or Leu
  misc_feature (796)..(796): Absent or Val or Ile or Cys or Gln or His
  misc_feature (797)..(797): Absent or Val or Gly or Asn
  misc_feature (798)..(798): Absent or Thr or Gln or Asp
  misc_feature (799)..(799): Absent or Ser or Pro or Val or Leu
  misc_feature (800)..(800): Absent or Asn or Pro or Glu or Gly
  misc_feature (801)..(801): Absent or Gln or Ile or Lys
  misc_feature (802)..(802): Absent or Phe or Glu or Gly or Cys or Val
  misc_feature (803)..(803): Absent or Arg or Pro
  misc_feature (804)..(804): Absent or Asp or Leu or His or Met or Ile
  misc_feature (805)..(805): Absent or Glu or Pro or Lys or His or Tyr
  misc_feature (806)..(806): Absent or Asn or Trp or Ser
  misc_feature (807)..(807): His or Absent or Gly or Glu or Arg
  misc_feature (808)..(808): Asp or Absent or His or Asn or Cys or Tyr or Phe or Ser or Lys
  misc_feature (809)..(809): Phe or Absent or Gln or Pro or Ser or Asp or His or Leu
  misc_feature (810)..(810): Arg or Absent or Ala or Val or Ser or Gly or Lys or Trp or Asn
  misc_feature (811)..(811): Ala or Absent or Asp or Glu or Gln or Asn
  misc_feature (812)..(812): Glu or Absent or Gly or Leu or Ile or Ala
  misc_feature (813)..(813): Trp or Absent or Glu or Arg or Ser or Tyr or Lys or His or Leu
  misc_feature (814)..(814): Thr or Absent or Ile or Phe or Val or Lys or Ser or Asn or Asp
  misc_feature (815)..(815): Ala or Absent or Leu or Pro or Asn or Ser or Phe
  misc_feature (816)..(816): Lys or Absent or Arg or Met or Thr or Ala or Gln
  misc_feature (817)..(817): Val or Absent or Asn or Gly or Asp or Gln or Ser or Pro
  misc_feature (818)..(818): Ala or Absent or Ser or Arg or Thr or Gly or Asp or Asn or His
  misc_feature (819)..(819): Ser or Absent or Ile or Val or Phe or Tyr or Met or Ala or Asp or Thr
  misc_feature (820)..(820): Met or Absent or Val or Gln or His or Gly or Thr or Ser or Glu or Leu or Ala
  misc_feature (821)..(821): Asn or Absent or Asp or Ser or Leu or Pro or Val or Ala
  misc_feature (822)..(822): Leu or Absent or Glu or Pro or Gln or Ala or Thr or Ser or Met or Arg or Val
  misc_feature (823)..(823): Ala or Absent or Thr or Val or Arg or Ile
  misc_feature (824)..(824): Glu or Absent or Lys or Asn or Asp or Arg or Gln or His
  misc_feature (825)..(825): Thr or Absent or Glu or Gln or Asp or Ala or Gly
  misc_feature (826)..(826): Leu or Absent or Cys or His or Asn or Asp or Ser or Tyr or Gln
  misc_feature (827)..(827): Glu or Absent or Ile or Leu or Lys or Asp or Gly or Gln
  misc_feature (828)..(828): Cys or Absent or Lys or Glu or Asn or Asp
  misc_feature (829)..(829): Phe or Absent or Asn or Asp
  misc_feature (830)..(830): Gly or Absent or Phe or Met or Tyr or Cys or Glu or Ile
  misc_feature (831)..(831): Val or Absent or Leu or Asp or Gly or Thr or Ile or Ser
  misc_feature (832)..(832): Val or Absent or Ala or Gly or Asp or His
  misc_feature (833)..(833): Val or Absent or Glu or Lys or Ser or Arg or Leu or Phe or Ile
  misc_feature (834)..(834): Glu or Absent or His or Gln or Pro or Tyr or Ser
  misc_feature (836)..(836): Gly or Absent or Arg or His or Asn
  misc_feature (837)..(837): Ser or Absent or Arg or Lys or Met or Thr
  misc_feature (838)..(838): His or Absent or Lys or Gln or Met or Arg
  misc_feature (839)..(839): Ala or Absent or Tyr or Met or Leu or Phe or Cys or Asn
  misc_feature (840)..(840): Asn or Absent or Thr or Leu or His or Tyr or Arg or Ile
  misc_feature (841)..(841): Ala or Absent or His or Pro or Tyr or Gln or Ser
  misc_feature (843)..(843): Gln or Absent or Arg or Pro or Ser or Asp
  misc_feature (844)..(844): Leu or Absent or Tyr or Lys or Arg or Phe or Ser or Met or Ile
  misc_feature (845)..(845): Arg or Absent or Met or Lys or Ser
  misc_feature (846)..(846): Thr or Absent or Gly or Ser or Met or Ile or Ala
  misc_feature (847)..(847): Ala or Absent or Gly or Pro or Glu
  misc_feature (848)..(848): Tyr or Absent or Arg or Leu or Ser or Asn or Ile or Thr or Cys
  misc_feature (849)..(849): Arg or Absent or Val or Asp or Glu or Asn
  misc_feature (850)..(850): Arg or Absent or Ile or Leu or Ser or Pro
  misc_feature (851)..(851): Ala or Absent or Phe or Ser or Leu or Arg or Lys
  misc_feature (852)..(852): Leu or Absent or Met or Glu
  misc_feature (853)..(853): Leu or Absent or Asp or Gly or Ala or Lys
  misc_feature (854)..(854): Gln or Absent or Thr or Ala or Arg or Gly or Asp or Glu
  misc_feature (855)..(855): Phe or Absent or Gly or Ser
  misc_feature (856)..(856): His or Absent or Gly or Leu or Met
  misc_feature (857)..(857): Pro or Absent or Asn or Ser or His
  misc_feature (858)..(858): Asp or Absent or Ser or Lys or Arg or Glu
  misc_feature (859)..(859): Arg or Absent or Ser or Gln or Asn
  misc_feature (860)..(860): Gln or Absent or Ser or Asn or His or Pro or Thr
  misc_feature (861)..(861): Arg or Absent or Val or Met or Pro or Leu or Ile or Ser or Cys or Thr
  misc_feature (862)..(862): Ser or Absent or Asp or Glu or Gly or Thr or Ala
  misc_feature (863)..(863): Lys or Absent or Ser or Met or Cys
  misc_feature (864)..(864): Asp or Absent or Arg or Val or Ile or Gly or Leu
  misc_feature (865)..(865): Leu or Absent or Ser or Phe or Asp or Asn
  misc_feature (866)..(866): Val or Absent or Gln or Pro or Ser or Leu
  misc_feature (867)..(867): Ala or Absent or Arg or Ser or Pro or Asp or Gly or Ile or Thr
  misc_feature (868)..(868): Arg or Absent or Leu or Phe or Gln or Ala or Lys or Thr or Ser or Pro
  misc_feature (869)..(869): Val or Absent or Asp or Ala or Gly or Asn or His or Ser or Tyr
  misc_feature (870)..(870): Glu or Absent or Gly or Arg or Lys or Gln
  misc_feature (871)..(871): Ala or Absent or Arg or Ser or Val or Asn
  misc_feature (872)..(872): Glu or Absent or Ser or His or Asn or Asp
  misc_feature (873)..(873): Glu or Absent or Arg or Lys or Thr or Pro
  misc_feature (874)..(874): Arg or Absent or Pro or Leu or Val or Ala or Gln
  misc_feature (875)..(875): Phe or Absent or Asp or Gly or Met or Ile or Val
  misc_feature (876)..(876): Lys or Absent or Pro or Thr or Ile or Leu or Met or Phe
  misc_feature (877)..(877): Ile or Absent or Met or Val or Glu or Asp
  misc_feature (878)..(878): Leu or Absent or Phe or Asp
  misc_feature (879)..(879): Ser or Absent or Asp or Glu or Gly or Val or Ala
  misc_feature (880)..(880): Asp or Absent or Glu
  misc_feature (882)..(882): Met or Absent or Asp or Glu or Ala or Ser or Gly
  misc_feature (884)..(884): Lys or Absent or Leu or Phe or Cys
  misc_feature (887)..(887): Ser or Absent or Pro or His or Leu or Cys
  misc_feature (889)..(889): His or Absent or Ser or Asn or Glu
  misc_feature (892)..(892): Cys or Absent or Val or Leu or Ile or Ser or Asp
  misc_feature (894)..(894): Leu or Absent or Lys or Gly or Asp or Ala
  misc_feature (896)..(896): Ile or Absent or Arg
  misc_feature (897)..(897): Arg or Absent or Ile
  misc_feature (898)..(898): Arg or Absent or Gly
  misc_feature (902)..(902): Pro or Absent or Leu
  misc_feature (903)..(903): Asp or Absent or Ala
  misc_feature (904)..(904): His or Absent or Tyr
  misc_feature (905)..(905): Arg or Absent or Ser
  misc_feature (906)..(906): Absent or Phe
  misc_feature (907)..(907): Absent or Trp
  misc_feature (908)..(908): Absent or Arg
  misc_feature (909)..(909): Absent or Ser
  misc_feature (910)..(910): Absent or Tyr
  misc_feature (911)..(911): Absent or Val
  misc_feature (912)..(912): Absent or Leu
  misc_feature (913)..(913): Absent or Met
  misc_feature (914)..(914): Absent or Leu
  misc_feature (915)..(915): Absent or Ile
  misc_feature (916)..(916): Absent or Leu
  misc_feature (917)..(917): Absent or Phe
  misc_feature (918)..(918): Absent or Trp
  misc_feature (927)..(927): Gln or Absent or Arg or His
  misc_feature (931)..(931): Gly or Absent or His or Arg or Gln or Asn
  misc_feature (944)..(944): Arg or Absent or Glu or Asp
  misc_feature (946)..(946): Val or Absent or His or Ser or Lys or Tyr
  misc_feature (948)..(948): Cys or Absent or Glu or Asn or Asp or Ala
  misc_feature (951)..(951): His or Absent or Asn or Lys or Asp or Glu or Ala
  misc_feature (954)..(954): Arg or Absent or Leu
  misc_feature (955)..(955): Absent or Arg
  misc_feature (956)..(956): Absent or Glu
  misc_feature (957)..(957): Absent or Val
  misc_feature (958)..(958): Absent or Ala or Thr
  misc_feature (959)..(959): Absent or Thr or Lys or Arg
  misc_feature (960)..(960): Absent or Phe or Arg or Ser or Cys
  misc_feature (963)..(963): Absent or Asp or Ser
  misc_feature (964)..(964): Absent or His
  misc_feature (965)..(965): Absent or Lys
  misc_feature (966)..(966): Absent or Phe
  misc_feature (967)..(967): Absent or Thr
  misc_feature (968)..(968): Absent or Cys
  misc_feature (969)..(969): Absent or Val
  misc_feature (970)..(970): Absent or Tyr
  misc_feature (971)..(971): Absent or Leu
  misc_feature (972)..(972): Absent or Leu
  misc_feature (973)..(973): Thr or Absent or Val
  misc_feature (984)..(984): Ser or Absent or Ile or Val
  misc_feature (986)..(986): His or Absent or Leu or Arg or Phe
  misc_feature (988)..(988): Arg or Absent or Met or Val or Leu
  misc_feature (996)..(996): Val or Absent or Asn or His
  misc_feature (1000)..(1000): His or Absent or Val or Ile
  misc_feature (1001)..(1001): Ser or Absent or Thr
  misc_feature (1003)..(1003): Ser or Absent or Tyr or Phe
  misc_feature (1011)..(1011): Pro or Absent or Arg or Lys or Thr
  misc_feature (1013)..(1013): Ile or Absent or Leu
  misc_feature (1017)..(1017): Gly or Absent or Gln or Asn or Asp or Ser or His or Lys
  misc_feature (1018)..(1018): Absent or Pro
  misc_feature (1019)..(1019): Absent or Pro
  misc_feature (1020)..(1020): Absent or Ala
  misc_feature (1021)..(1021): Absent or Ala or Val
  misc_feature (1022)..(1022): Absent or Met or Ala
  misc_feature (1023)..(1023): Absent or Pro or Glu or Ala or Arg or Cys or Phe or Ser
  misc_feature (1024)..(1024): Absent or Ile or Ala or Glu or Gln or Leu or His
  misc_feature (1028)..(1028): Ala or Absent or Arg or Lys or Trp
  misc_feature (1032)..(1032): Thr or Absent or Tyr or Asn or Arg or Lys
  misc_feature (1039)..(1039): His or Absent or Lys or Arg or Met
  misc_feature (1046)..(1046): Ala or Absent or Arg or Ser or Thr or Ile
  misc_feature (1048)..(1048): Ile or Absent or Asn or Glu or Ser or Val or Met or Leu or Thr
  misc_feature (1058)..(1058): Ala or Absent or Ser or Thr
  misc_feature (1065)..(1065): Phe or Absent or Lys or Asp or Asn or Glu or Thr
  misc_feature (1068)..(1068): Arg or Absent or Thr or Val or Asn
  misc_feature (1072)..(1072): Pro or Absent or Cys or Gly
  misc_feature (1082)..(1082): Met or Absent or Asn or Ser or Gly
  misc_feature (1106)..(1106): Pro or Absent or Ala or Leu or Gln or Asn
  misc_feature (1127)..(1127): Arg or Absent or Gln or Leu or Lys
  misc_feature (1128)..(1128): Ala or Absent or Gln or Glu or Leu or Met or Lys or Ser
  misc_feature (1131)..(1131): Val or Absent or Gly or Gln or Ala or Thr or Ser or His or Arg
  misc_feature (1146)..(1146): Pro or Absent or Asn or Gly or His or Asp
  misc_feature (1147)..(1147): Leu or Absent or Lys or Arg
  misc_feature (1150)..(1150): Glu or Absent or Pro or Asp
  misc_feature (1153)..(1153): Arg or Absent or Ser or Glu or Lys or Met
  misc_feature (1154)..(1154): Ala or Absent or Asp or Ser or Glu
  misc_feature (1155)..(1155): Arg or Absent or Leu or Val or Ile
  misc_feature (1158)..(1158): Ser or Absent or Gln or Val or Asn or Leu or Ile or Lys
  misc_feature (1160)..(1160): Gly or Absent or Ala or Ser
  misc_feature (1161)..(1161): Asn or Absent or Ser or Thr or Arg or Met
  misc_feature (1164)..(1164): Ser or Absent or Glu or Arg or Lys or Phe or Trp or Gln or Leu
  misc_feature (1165)..(1165): Leu or Absent or Ala or Asp or Glu or Gln
  misc_feature (1169)..(1169): Arg or Absent or Asn or Lys or Thr or Met or Ser
  misc_feature (1173)..(1173): Ser or Absent or Lys or Glu or Leu or Ala
  misc_feature (1178)..(1178): Thr or Absent or Ala or Glu or Ser or Ile
  misc_feature (1179)..(1179): Arg or Absent or Ser or Thr or His or Asp or Gln or Glu
  misc_feature (1181)..(1181): Ser or Absent or Met or Val or Ala or Thr
  misc_feature (1182)..(1182): Ala or Absent or Glu or Gln or Ser or Val or Thr
  misc_feature (1183)..(1183): Arg or Absent or Ser or Glu or Ala or Tyr or Val
  misc_feature (1185)..(1185): Asp or Absent or Arg or Met or Lys or Gln or Asn or Thr
  misc_feature (1186)..(1186): Ala or Absent or Pro or Ser or Thr
  misc_feature (1187)..(1187): Arg or Absent or Leu or Val
  misc_feature (1188)..(1188): Ala or Absent or Ile or Asn or Pro or Gln
  misc_feature (1191)..(1191): Trp or Absent or Pro or Leu or Val or Gly
  misc_feature (1192)..(1192): Val or Absent or Thr or Ala or Ser or Ile or Leu
  misc_feature (1194)..(1194): Gly or Absent or Gln or Leu or Pro or Ser or Cys or Ala or Thr or Val
  misc_feature (1195)..(1195): Gly or Absent or Pro or Ser or His or Tyr or Asn
  misc_feature (1196)..(1196): Absent or Ser or Asp or Gln or Leu or Val or Ile
  misc_feature (1197)..(1197): Absent or His or Arg or Pro or Asp or Glu or Ile
  misc_feature (1198)..(1198): Absent or Ala or Pro or Gln or Thr or Asn or Ser or Val
  misc_feature (1199)..(1199): Absent or Asp or Gly or Ile or Ser or Gln or Ala or Pro or Leu
  misc_feature (1200)..(1200): Absent or Met or Val or Gln or Arg or Ser or Gly or Asn
  misc_feature (1201)..(1201): Absent or Pro or Thr or Glu or Phe or Asn or Ser or Leu or His
  misc_feature (1202)..(1202): Absent or Ile or Leu or Arg or Pro or His or Tyr or Thr or Val
  misc_feature (1203)..(1203): Absent or Leu or Pro or Ser or Val or Trp
  misc_feature (1204)..(1204): Absent or Thr or Ser or Arg or Pro or His or Gln or Phe
  misc_feature (1205)..(1205): Absent or Glu or Leu or Gln or Tyr
  misc_feature (1206)..(1206): Absent or Thr or Glu or Asp
  misc_feature (1207)..(1207): Absent or Val or Ile or Pro
  misc_feature (1208)..(1208): Absent or Pro or Ser or Trp or Ala or Glu
  misc_feature (1209)..(1209): Absent or Thr or Val or Leu or Asp
  misc_feature (1210)..(1210): Absent or Val or Ser or Asn or His or Tyr or Glu or Ala
  misc_feature (1211)..(1211): Absent or Pro or Ser or Leu or Arg or Val or Trp
  misc_feature (1212)..(1212): Absent or Pro or Thr or Ser or Arg or Ile
  misc_feature (1213)..(1213): Absent or Val or Pro or Thr or Leu or Asp
  misc_feature (1214)..(1214): Absent or Pro or Cys or Gly
  misc_feature (1215)..(1215): Absent or Glu or Asp
  misc_feature (1216)..(1216): Absent or Glu or Val
  misc_feature (1217)..(1217): Absent or Ala or Glu
  misc_feature (1218)..(1218): Absent or Ser or Lys
  misc_feature (1219)..(1219): Absent or Lys or Ile
  misc_feature (1220)..(1220): Absent or Pro or Asn
  misc_feature (1221)..(1221): Absent or Asn or Gly
  misc_feature (1222)..(1222): Absent or Pro or Gln
  misc_feature (1223)..(1223): Absent or Asp or Glu
  misc_feature (1224)..(1224): Absent or Asp or Val
  misc_feature (1225)..(1225): Absent or Trp or Val
  misc_feature (1226)..(1226): Absent or Ser or Ile
  misc_feature (1227)..(1227): Absent or Asp or Gln
  misc_feature (1228)..(1228): Absent or Asp or Ala
  misc_feature (1229)..(1229): Absent or Arg or Thr
  misc_feature (1230)..(1230): Absent or Phe or Thr
  misc_feature (1231)..(1231): Absent or Arg or Gly
  misc_feature (1232)..(1232): Absent or Val or Lys
  misc_feature (1233)..(1233): Absent or Lys
  misc_feature (1234)..(1234): Absent or Val
  misc_feature (1235)..(1235): Absent or Gln or Thr
  misc_feature (1236)..(1236): Absent or Ser
  misc_feature (1237)..(1237): Absent or Ser
  misc_feature (1238)..(1238): Absent or Ile
  misc_feature (1239)..(1239): Absent or Thr
  misc_feature (1240)..(1240): Absent or Glu
  misc_feature (1241)..(1241): Absent or Ile
  misc_feature (1242)..(1242): Absent or Leu
  misc_feature (1243)..(1243): Absent or Thr
  misc_feature (1244)..(1244): Absent or Phe
  misc_feature (1245)..(1245): Absent or Gln
  misc_feature (1246)..(1246): Absent or Leu
  misc_feature (1247)..(1247): Absent or His
  misc_feature (1248)..(1248): Absent or Thr
  misc_feature (1249)..(1249): Absent or Tyr
  misc_feature (1250)..(1250): Absent or Ser
  misc_feature (1251)..(1251): Absent or Val
  misc_feature (1252)..(1252): Absent or Thr
  misc_feature (1253)..(1253): Absent or Ala
  misc_feature (1254)..(1254): Absent or Lys
  misc_feature (1255)..(1255): Absent or Leu
  misc_feature (1256)..(1256): Absent or Ser
  misc_feature (1257)..(1257): Absent or Lys
  misc_feature (1258)..(1258): Absent or Ile
  misc_feature (1259)..(1259): Absent or Tyr
  misc_feature (1260)..(1260): Absent or Pro
  misc_feature (1261)..(1261): Absent or Lys
  misc_feature (1262)..(1262): Absent or Asp
  misc_feature (1263)..(1263): Absent or Val
  misc_feature (1264)..(1264): Absent or Glu
  misc_feature (1265)..(1265): Absent or Ala
  misc_feature (1266)..(1266): Absent or Pro
  misc_feature (1267)..(1267): Absent or Ala
  misc_feature (1268)..(1268): Absent or Gly
  misc_feature (1269)..(1269): Absent or Gly
  misc_feature (1270)..(1270): Absent or Val
  misc_feature (1271)..(1271): Absent or Asp
  misc_feature (1272)..(1272): Absent or Asp
  misc_feature (1273)..(1273): Absent or Met
  misc_feature (1274)..(1274): Absent or Thr
  misc_feature (1275)..(1275): Absent or Lys
  misc_feature (1276)..(1276): Absent or Leu
  misc_feature (1277)..(1277): Absent or Ser
  misc_feature (1278)..(1278): Absent or Tyr
  misc_feature (1279)..(1279): Absent or Leu
  misc_feature (1280)..(1280): Absent or His
  misc_feature (1281)..(1281): Absent or Glu
  misc_feature (1282)..(1282): Absent or Pro
  misc_feature (1283)..(1283): Absent or Gly
  misc_feature (1284)..(1284): Absent or Val
  misc_feature (1285)..(1285): Absent or Leu
  misc_feature (1286)..(1286): Absent or Gln
  misc_feature (1287)..(1287): Absent or Asn
  misc_feature (1288)..(1288): Absent or Leu
  misc_feature (1289)..(1289): Absent or Lys
  misc_feature (1290)..(1290): Absent or Ile
  misc_feature (1291)..(1291): Absent or Arg
  misc_feature (1292)..(1292): Absent or Tyr
  misc_feature (1293)..(1293): Absent or Glu
  misc_feature (1294)..(1294): Absent or Leu
  misc_feature (1295)..(1295): Absent or Asn
  misc_feature (1296)..(1296): Absent or Glu
  misc_feature (1297)..(1297): Absent or Ile
  misc_feature (1298)..(1298): Absent or Tyr
  misc_feature (1299)..(1299): Absent or Thr
  misc_feature (1300)..(1300): Absent or Tyr
  misc_feature (1301)..(1301): Absent or Thr
  misc_feature (1302)..(1302): Absent or Gly
  misc_feature (1303)..(1303): Absent or Asn
  misc_feature (1304)..(1304): Absent or Ile
  misc_feature (1305)..(1305): Absent or Leu
  misc_feature (1306)..(1306): Absent or Ile
  misc_feature (1307)..(1307): Absent or Ala
  misc_feature (1308)..(1308): Absent or Ile
  misc_feature (1309)..(1309): Absent or Asn
  misc_feature (1310)..(1310): Absent or Pro
  misc_feature (1311)..(1311): Absent or Phe
  misc_feature (1312)..(1312): Absent or Gln
  misc_feature (1313)..(1313): Absent or Arg
  misc_feature (1314)..(1314): Absent or Leu
  misc_feature (1315)..(1315): Absent or Pro
  misc_feature (1316)..(1316): Absent or His
  misc_feature (1317)..(1317): Absent or Ile
  misc_feature (1318)..(1318): Absent or Tyr
  misc_feature (1319)..(1319): Absent or Asp
  misc_feature (1320)..(1320): Absent or Ala
  misc_feature (1321)..(1321): Absent or His
  misc_feature (1322)..(1322): Absent or Met
  misc_feature (1323)..(1323): Absent or Met
  misc_feature (1324)..(1324): Absent or Gln
  misc_feature (1325)..(1325): Absent or Gln
  misc_feature (1326)..(1326): Absent or Tyr
  misc_feature (1327)..(1327): Absent or Lys
  misc_feature (1328)..(1328): Absent or Gly
  misc_feature (1329)..(1329): Absent or Ala
  misc_feature (1330)..(1330): Absent or Pro
  misc_feature (1331)..(1331): Absent or Leu
  misc_feature (1332)..(1332): Absent or Gly
  misc_feature (1333)..(1333): Absent or Glu
  misc_feature (1334)..(1334): Absent or Leu
  misc_feature (1335)..(1335): Absent or Ser
  misc_feature (1336)..(1336): Absent or Pro
  misc_feature (1337)..(1337): Absent or His
  misc_feature (1338)..(1338): Absent or Val
  misc_feature (1339)..(1339): Absent or Phe
  misc_feature (1340)..(1340): Absent or Ala
  misc_feature (1341)..(1341): Absent or Val
  misc_feature (1342)..(1342): Absent or Ala
  misc_feature (1343)..(1343): Absent or Asp
  misc_feature (1344)..(1344): Absent or Val
  misc_feature (1345)..(1345): Absent or Ala
  misc_feature (1346)..(1346): Absent or Tyr
  misc_feature (1347)..(1347): Absent or Arg
  misc_feature (1348)..(1348): Absent or Ala
  misc_feature (1349)..(1349): Absent or Met
  misc_feature (1350)..(1350): Absent or Ile
  misc_feature (1351)..(1351): Absent or Asn
  misc_feature (1352)..(1352): Absent or Glu
  misc_feature (1353)..(1353): Absent or Gly
  misc_feature (1354)..(1354): Absent or Lys
  misc_feature (1355)..(1355): Absent or Ser
  misc_feature (1356)..(1356): Absent or Asn
  misc_feature (1357)..(1357): Absent or Ser
  misc_feature (1358)..(1358): Absent or Ile
  misc_feature (1359)..(1359): Absent or Leu
  misc_feature (1360)..(1360): Absent or Val
  misc_feature (1361)..(1361): Absent or Ser
  misc_feature (1362)..(1362): Absent or Gly
  misc_feature (1363)..(1363): Absent or Glu
  misc_feature (1364)..(1364): Absent or Ser
  misc_feature (1365)..(1365): Absent or Gly
  misc_feature (1366)..(1366): Absent or Ala
  misc_feature (1367)..(1367): Absent or Gly
  misc_feature (1368)..(1368): Absent or Lys
  misc_feature (1369)..(1369): Absent or Thr
  misc_feature (1370)..(1370): Absent or Glu
  misc_feature (1371)..(1371): Absent or Thr
  misc_feature (1372)..(1372): Absent or Thr
  misc_feature (1373)..(1373): Absent or Lys
  misc_feature (1374)..(1374): Absent or Met
  misc_feature (1375)..(1375): Absent or Leu
  misc_feature (1376)..(1376): Absent or Met
  misc_feature (1377)..(1377): Absent or Arg
  misc_feature (1378)..(1378): Absent or Tyr
  misc_feature (1379)..(1379): Absent or Leu
  misc_feature (1380)..(1380): Absent or Ala
  misc_feature (1381)..(1381): Absent or Tyr
  misc_feature (1382)..(1382): Absent or Leu
  misc_feature (1383)..(1383): Absent or Gly
  misc_feature (1384)..(1384): Absent or Gly
  misc_feature (1385)..(1385): Absent or Arg
  misc_feature (1386)..(1386): Absent or Ala
  misc_feature (1387)..(1387): Absent or Val
  misc_feature (1388)..(1388): Absent or Thr
  misc_feature (1389)..(1389): Absent or Glu
  misc_feature (1390)..(1390): Absent or Gly
  misc_feature (1391)..(1391): Absent or Arg
  misc_feature (1392)..(1392): Absent or Thr
  misc_feature (1393)..(1393): Absent or Val
  misc_feature (1394)..(1394): Absent or Glu
  misc_feature (1395)..(1395): Absent or Gln
  misc_feature (1396)..(1396): Absent or Gln
  misc_feature (1397)..(1397): Absent or Val
  misc_feature (1398)..(1398): Absent or Leu
  misc_feature (1399)..(1399): Absent or Glu
  misc_feature (1400)..(1400): Absent or Ser
  misc_feature (1401)..(1401): Absent or Asn
  misc_feature (1402)..(1402): Absent or Pro
  misc_feature (1403)..(1403): Absent or Val
  misc_feature (1404)..(1404): Absent or Leu
  misc_feature (1405)..(1405): Absent or Glu
  misc_feature (1406)..(1406): Absent or Ala
  misc_feature (1407)..(1407): Absent or Phe
  misc_feature (1408)..(1408): Absent or Gly
  misc_feature (1409)..(1409): Absent or Asn
  misc_feature (1410)..(1410): Absent or Ala
  misc_feature (1411)..(1411): Absent or Lys
  misc_feature (1412)..(1412): Absent or Thr
  misc_feature (1413)..(1413): Absent or Val
  misc_feature (1414)..(1414): Absent or Arg
  misc_feature (1415)..(1415): Absent or Asn
  misc_feature (1416)..(1416): Absent or Asn
  misc_feature (1417)..(1417): Absent or Asn
  misc_feature (1418)..(1418): Absent or Ser
  misc_feature (1419)..(1419): Absent or Ser
  misc_feature (1420)..(1420): Absent or Arg
  misc_feature (1421)..(1421): Absent or Phe
  misc_feature (1422)..(1422): Absent or Gly
  misc_feature (1423)..(1423): Absent or Lys
  misc_feature (1424)..(1424): Absent or Phe
  misc_feature (1425)..(1425): Absent or Val
  misc_feature (1426)..(1426): Absent or Glu
  misc_feature (1427)..(1427): Absent or Ile
  misc_feature (1428)..(1428): Absent or Gln
  misc_feature (1429)..(1429): Absent or Phe
  misc_feature (1430)..(1430): Absent or Asp
  misc_feature (1431)..(1431): Absent or Lys
  misc_feature (1432)..(1432): Absent or Gln
  misc_feature (1433)..(1433): Absent or Gly
  misc_feature (1434)..(1434): Absent or Arg
  misc_feature (1435)..(1435): Absent or Ile
  misc_feature (1436)..(1436): Absent or Ser
  misc_feature (1437)..(1437): Absent or Gly
  misc_feature (1438)..(1438): Absent or Ala
  misc_feature (1439)..(1439): Absent or Ala
  misc_feature (1440)..(1440): Absent or Ile
  misc_feature (1441)..(1441): Absent or Arg
  misc_feature (1442)..(1442): Absent or Thr
  misc_feature (1443)..(1443): Absent or Tyr
  misc_feature (1444)..(1444): Absent or Leu
  misc_feature (1445)..(1445): Absent or Leu
  misc_feature (1446)..(1446): Absent or Glu
  misc_feature (1447)..(1447): Absent or Arg
  misc_feature (1448)..(1448): Absent or Ser
  misc_feature (1449)..(1449): Absent or Arg
  misc_feature (1450)..(1450): Absent or Val
  misc_feature (1451)..(1451): Absent or Cys
  misc_feature (1452)..(1452): Absent or Gln
  misc_feature (1453)..(1453): Absent or Ile
  misc_feature (1454)..(1454): Absent or Ser
  misc_feature (1455)..(1455): Absent or Asp
  misc_feature (1456)..(1456): Absent or Pro
  misc_feature (1457)..(1457): Absent or Glu
  misc_feature (1458)..(1458): Absent or Arg
  misc_feature (1459)..(1459): Absent or Asn
  misc_feature (1460)..(1460): Absent or Tyr
  misc_feature (1461)..(1461): Absent or His
  misc_feature (1462)..(1462): Absent or Cys
  misc_feature (1463)..(1463): Absent or Phe
  misc_feature (1464)..(1464): Absent or Tyr
  misc_feature (1465)..(1465): Absent or Leu
  misc_feature (1466)..(1466): Absent or Leu
  misc_feature (1467)..(1467): Absent or Cys
  misc_feature (1468)..(1468): Absent or Ala
  misc_feature (1469)..(1469): Absent or Ala
  misc_feature (1470)..(1470): Absent or Pro
  misc_feature (1471)..(1471): Absent or Gln
  misc_feature (1472)..(1472): Absent or Glu
  misc_feature (1473)..(1473): Absent or Glu
  misc_feature (1474)..(1474): Absent or Ile
  misc_feature (1475)..(1475): Absent or Glu
  misc_feature (1476)..(1476): Absent or Lys
  misc_feature (1477)..(1477): Absent or Tyr
  misc_feature (1478)..(1478): Absent or Lys
  misc_feature (1479)..(1479): Absent or Leu
  misc_feature (1480)..(1480): Absent or Gly
  misc_feature (1481)..(1481): Absent or His
  misc_feature (1482)..(1482): Absent or Pro
  misc_feature (1483)..(1483): Absent or Lys
  misc_feature (1484)..(1484): Absent or Thr
  misc_feature (1485)..(1485): Absent or Phe
  misc_feature (1486)..(1486): Absent or His
  misc_feature (1487)..(1487): Absent or Tyr
  misc_feature (1488)..(1488): Absent or Leu
  misc_feature (1489)..(1489): Absent or Asn
  misc_feature (1490)..(1490): Absent or Gln
  misc_feature (1491)..(1491): Absent or Ser
  misc_feature (1492)..(1492): Absent or Lys
  misc_feature (1493)..(1493): Absent or Cys
  misc_feature (1494)..(1494): Absent or Phe
  misc_feature (1495)..(1495): Absent or Glu
  misc_feature (1496)..(1496): Absent or Leu
  misc_feature (1497)..(1497): Absent or Val
  misc_feature (1498)..(1498): Absent or Gly
  misc_feature (1499)..(1499): Absent or Ile
  misc_feature (1500)..(1500): Absent or Ser
  misc_feature (1501)..(1501): Absent or Asp
  misc_feature (1502)..(1502): Absent or Ala
  misc_feature (1503)..(1503): Absent or His
  misc_feature (1504)..(1504): Absent or Asp
  misc_feature (1505)..(1505): Absent or Tyr
  misc_feature (1506)..(1506): Absent or Leu
  misc_feature (1507)..(1507): Absent or Ala
  misc_feature (1508)..(1508): Absent or Thr
  misc_feature (1509)..(1509): Absent or Arg
  misc_feature (1510)..(1510): Absent or Arg
  misc_feature (1511)..(1511): Absent or Ala
  misc_feature (1512)..(1512): Absent or Met
  misc_feature (1513)..(1513): Absent or Asp
  misc_feature (1514)..(1514): Absent or Ile
  misc_feature (1515)..(1515): Absent or Val
  misc_feature (1516)..(1516): Absent or Gly
  misc_feature (1517)..(1517): Absent or Ile
  misc_feature (1518)..(1518): Absent or Ser
  misc_feature (1519)..(1519): Absent or Glu
  misc_feature (1520)..(1520): Absent or Lys
  misc_feature (1521)..(1521): Absent or Glu
  misc_feature (1522)..(1522): Absent or Gln
  misc_feature (1523)..(1523): Absent or Val
  misc_feature (1524)..(1524): Absent or Ser
  misc_feature (1525)..(1525): Absent or Phe
  misc_feature (1526)..(1526): Absent or Cys
  misc_feature (1527)..(1527): Absent or Lys
  misc_feature (1528)..(1528): Absent or Gln
  misc_feature (1529)..(1529): Absent or Leu
  misc_feature (1530)..(1530): Absent or His
  misc_feature (1531)..(1531): Absent or Leu
  misc_feature (1532)..(1532): Absent or Glu
  misc_feature (1533)..(1533): Absent or Ala
  misc_feature (1534)..(1534): Absent or Ile
  misc_feature (1535)..(1535): Absent or Phe
  misc_feature (1536)..(1536): Absent or Arg
  misc_feature (1537)..(1537): Absent or Val
  misc_feature (1538)..(1538): Absent or Val
  misc_feature (1539)..(1539): Absent or Ala
  misc_feature (1540)..(1540): Absent or Ala
  misc_feature (1541)..(1541): Absent or Ile
  misc_feature (1542)..(1542): Absent or Leu
  misc_feature (1543)..(1543): Absent or His
  misc_feature (1544)..(1544): Absent or Ile
  misc_feature (1545)..(1545): Absent or Gly
  misc_feature (1546)..(1546): Absent or Asn
  misc_feature (1547)..(1547): Absent or Ile
  misc_feature (1548)..(1548): Absent or Asp
  misc_feature (1549)..(1549): Absent or Phe
  misc_feature (1550)..(1550): Absent or Thr
  misc_feature (1551)..(1551): Absent or Lys
  misc_feature (1552)..(1552): Absent or Gly
  misc_feature (1553)..(1553): Absent or Lys
  misc_feature (1554)..(1554): Absent or Glu
  misc_feature (1555)..(1555): Absent or Val
  misc_feature (1556)..(1556): Absent or Asp
  misc_feature (1557)..(1557): Absent or Ser
  misc_feature (1558)..(1558): Absent or Ser
  misc_feature (1559)..(1559): Absent or Val
  misc_feature (1560)..(1560): Absent or Pro
  misc_feature (1561)..(1561): Absent or Lys
  misc_feature (1562)..(1562): Absent or Asp
  misc_feature (1563)..(1563): Absent or Glu
  misc_feature (1564)..(1564): Absent or Lys
  misc_feature (1565)..(1565): Absent or Ser
  misc_feature (1566)..(1566): Absent or Lys
  misc_feature (1567)..(1567): Absent or Phe
  misc_feature (1568)..(1568): Absent or His
  misc_feature (1569)..(1569): Absent or Leu
  misc_feature (1570)..(1570): Absent or Lys
  misc_feature (1571)..(1571): Absent or Thr
  misc_feature (1572)..(1572): Absent or Ala
  misc_feature (1573)..(1573): Absent or Ala
  misc_feature (1574)..(1574): Absent or Glu
  misc_feature (1575)..(1575): Absent or Leu
  misc_feature (1576)..(1576): Absent or Leu
  misc_feature (1577)..(1577): Absent or Met
  misc_feature (1578)..(1578): Absent or Cys
  misc_feature (1579)..(1579): Absent or Asp
  misc_feature (1580)..(1580): Absent or Leu
  misc_feature (1581)..(1581): Absent or Lys
  misc_feature (1582)..(1582): Absent or Ala
  misc_feature (1583)..(1583): Absent or Leu
  misc_feature (1584)..(1584): Absent or Glu
  misc_feature (1585)..(1585): Absent or Asp
  misc_feature (1586)..(1586): Absent or Ala
  misc_feature (1587)..(1587): Absent or Leu
  misc_feature (1588)..(1588): Absent or Cys
  misc_feature (1589)..(1589): Absent or Lys
  misc_feature (1590)..(1590): Absent or Arg
  misc_feature (1591)..(1591): Absent or Val
  misc_feature (1592)..(1592): Absent or Met
  misc_feature (1593)..(1593): Absent or Ile
  misc_feature (1594)..(1594): Absent or Thr
  misc_feature (1595)..(1595): Absent or Pro
  misc_feature (1596)..(1596): Absent or Glu
  misc_feature (1597)..(1597): Absent or Glu
  misc_feature (1598)..(1598): Absent or Val
  misc_feature (1599)..(1599): Absent or Ile
  misc_feature (1600)..(1600): Absent or Lys
  misc_feature (1601)..(1601): Absent or Arg
  misc_feature (1602)..(1602): Absent or Ser
  misc_feature (1603)..(1603): Absent or Leu
  misc_feature (1604)..(1604): Absent or Asp
  misc_feature (1605)..(1605): Absent or Pro
  misc_feature (1606)..(1606): Absent or Gln
  misc_feature (1607)..(1607): Absent or Ser
  misc_feature (1608)..(1608): Absent or Ala
  misc_feature (1609)..(1609): Absent or Val
  misc_feature (1610)..(1610): Absent or Thr
  misc_feature (1611)..(1611): Absent or Ser
  misc_feature (1612)..(1612): Absent or Arg
  misc_feature (1613)..(1613): Absent or Asp
  misc_feature (1614)..(1614): Absent or Gly
  misc_feature (1615)..(1615): Absent or Leu
  misc_feature (1616)..(1616): Absent or Ala
  misc_feature (1617)..(1617): Absent or Lys
  misc_feature (1618)..(1618): Absent or Thr
  misc_feature (1619)..(1619): Absent or Val
  misc_feature (1620)..(1620): Absent or Tyr
  misc_feature (1621)..(1621): Absent or Ser
  misc_feature (1622)..(1622): Absent or Arg
  misc_feature (1623)..(1623): Absent or Leu
  misc_feature (1624)..(1624): Absent or Phe
  misc_feature (1625)..(1625): Absent or Asp
  misc_feature (1626)..(1626): Absent or Trp
  misc_feature (1627)..(1627): Absent or Leu
  misc_feature (1628)..(1628): Absent or Val
  misc_feature (1629)..(1629): Absent or Asp
  misc_feature (1630)..(1630): Absent or Lys
  misc_feature (1631)..(1631): Absent or Ile
  misc_feature (1632)..(1632): Absent or Asn
  misc_feature (1633)..(1633): Absent or Lys
  misc_feature (1634)..(1634): Absent or Ser
  misc_feature (1635)..(1635): Absent or Ile
  misc_feature (1636)..(1636): Absent or Gly
  misc_feature (1637)..(1637): Absent or Gln
  misc_feature (1638)..(1638): Absent or Asp
  misc_feature (1639)..(1639): Absent or Ala
  misc_feature (1640)..(1640): Absent or Asn
  misc_feature (1641)..(1641): Absent or Ser
  misc_feature (1642)..(1642): Absent or Arg
  misc_feature (1643)..(1643): Absent or Ser
  misc_feature (1644)..(1644): Absent or Leu
  misc_feature (1645)..(1645): Absent or Ile
  misc_feature (1646)..(1646): Absent or Gly
  misc_feature (1647)..(1647): Absent or Val
  misc_feature (1648)..(1648): Absent or Leu
  misc_feature (1649)..(1649): Absent or Asp
  misc_feature (1650)..(1650): Absent or Ile
  misc_feature (1651)..(1651): Absent or Tyr
  misc_feature (1652)..(1652): Absent or Gly
  misc_feature (1653)..(1653): Absent or Phe
  misc_feature (1654)..(1654): Absent or Glu
  misc_feature (1655)..(1655): Absent or Ser
  misc_feature (1656)..(1656): Absent or Phe
  misc_feature (1657)..(1657): Absent or Lys
  misc_feature (1658)..(1658): Absent or Thr
  misc_feature (1659)..(1659): Absent or Asn
  misc_feature (1660)..(1660): Absent or Arg
  misc_feature (1661)..(1661): Absent or Leu
  misc_feature (1662)..(1662): Absent or Ala
  misc_feature (1663)..(1663): Absent or Val
  misc_feature (1664)..(1664): Absent or Cys
  misc_feature (1665)..(1665): Absent or His
  misc_feature (1666)..(1666): Absent or Ser
  misc_feature (1667)..(1667): Absent or Leu
  misc_feature (1668)..(1668): Absent or Leu
  misc_feature (1669)..(1669): Absent or Ile
  misc_feature (1670)..(1670): Absent or Pro
  misc_feature (1671)..(1671): Absent or Phe
  misc_feature (1672)..(1672): Absent or Cys
  misc_feature (1673)..(1673): Absent or Cys
  misc_feature (1674)..(1674): Absent or Ser
  misc_feature (1675)..(1675): Absent or Phe
  misc_feature (1676)..(1676): Absent or Glu
  misc_feature (1677)..(1677): Absent or Gln
  misc_feature (1678)..(1678): Absent or Phe
  misc_feature (1679)..(1679): Absent or Cys
  misc_feature (1680)..(1680): Absent or Ile
  misc_feature (1681)..(1681): Absent or Asn
  misc_feature (1682)..(1682): Absent or Phe
  misc_feature (1683)..(1683): Absent or Thr
  misc_feature (1684)..(1684): Absent or Asn
  misc_feature (1685)..(1685): Absent or Glu
  misc_feature (1686)..(1686): Absent or Lys
  misc_feature (1687)..(1687): Absent or Leu
  misc_feature (1688)..(1688): Absent or Gln
  misc_feature (1689)..(1689): Absent or Gln
  misc_feature (1690)..(1690): Absent or His
  misc_feature (1691)..(1691): Absent or Phe
  misc_feature (1692)..(1692): Absent or Asn
  misc_feature (1693)..(1693): Absent or Gln
  misc_feature (1694)..(1694): Absent or His
  misc_feature (1695)..(1695): Absent or Val
  misc_feature (1696)..(1696): Absent or Phe
  misc_feature (1697)..(1697): Absent or Lys
  misc_feature (1698)..(1698): Absent or Met
  misc_feature (1699)..(1699): Absent or Glu
  misc_feature (1700)..(1700): Absent or Gln
  misc_feature (1701)..(1701): Absent or Glu
  misc_feature (1702)..(1702): Absent or Glu
  misc_feature (1703)..(1703): Absent or Tyr
  misc_feature (1704)..(1704): Absent or Thr
  misc_feature (1705)..(1705): Absent or Lys
  misc_feature (1706)..(1706): Absent or Glu
  misc_feature (1707)..(1707): Absent or Ala
  misc_feature (1708)..(1708): Absent or Ile
  misc_feature (1709)..(1709): Absent or Asp
  misc_feature (1710)..(1710): Absent or Trp
  misc_feature (1711)..(1711): Absent or Ser
  misc_feature (1712)..(1712): Absent or Tyr
  misc_feature (1713)..(1713): Absent or Ile
  misc_feature (1714)..(1714): Absent or Glu
  misc_feature (1715)..(1715): Absent or Phe
  misc_feature (1716)..(1716): Absent or Val
  misc_feature (1717)..(1717): Absent or Asp
  misc_feature (1718)..(1718): Absent or Asn
  misc_feature (1719)..(1719): Absent or Gln
  misc_feature (1720)..(1720): Absent or Asp
  misc_feature (1721)..(1721): Absent or Val
  misc_feature (1722)..(1722): Absent or Leu
  misc_feature (1723)..(1723): Absent or Asp
  misc_feature (1724)..(1724): Absent or Leu
  misc_feature (1725)..(1725): Absent or Ile
  misc_feature (1726)..(1726): Absent or Glu
  misc_feature (1727)..(1727): Absent or Lys
  misc_feature (1728)..(1728): Absent or Val
  misc_feature (1729)..(1729): Absent or Ile
  misc_feature (1730)..(1730): Absent or Ser
  misc_feature (1731)..(1731): Absent or Glu
  misc_feature (1732)..(1732): Absent or Pro
  misc_feature (1733)..(1733): Absent or Arg
  misc_feature (1734)..(1734): Absent or Lys
  misc_feature (1735)..(1735): Absent or Asp
  misc_feature (1736)..(1736): Absent or Asn
  misc_feature (1737)..(1737): Absent or Val
  misc_feature (1738)..(1738): Absent or Asn
  misc_feature (1739)..(1739): Absent or Lys
  misc_feature (1740)..(1740): Absent or Ile
  misc_feature (1741)..(1741): Absent or Thr
  misc_feature (1742)..(1742): Absent or Pro
  misc_feature (1743)..(1743): Absent or His
  misc_feature (1744)..(1744): Absent or Thr
  misc_feature (1745)..(1745): Absent or Gly
  misc_feature (1746)..(1746): Absent or Trp
  misc_feature (1747)..(1747): Absent or Ile
  misc_feature (1748)..(1748): Absent or Leu
  misc_feature (1749)..(1749): Absent or Leu
  misc_feature (1750)..(1750): Absent or Ser
  misc_feature (1751)..(1751): Absent or His
  misc_feature (1752)..(1752): Absent or Phe
  misc_feature (1753)..(1753): Absent or Ile
  misc_feature (1754)..(1754): Absent or Ser
  misc_feature (1755)..(1755): Absent or Pro
  misc_feature (1756)..(1756): Absent or Phe
  misc_feature (1757)..(1757): Absent or Ile
  misc_feature (1758)..(1758): Absent or Phe
  misc_feature (1759)..(1759): Absent or His
  misc_feature (1760)..(1760): Absent or Leu
  misc_feature (1761)..(1761): Absent or Gln
  misc_feature (1762)..(1762): Absent or Lys
  misc_feature (1763)..(1763): Absent or Pro
  misc_feature (1764)..(1764): Absent or Gly
  misc_feature (1765)..(1765): Absent or Gly
  misc_feature (1766)..(1766): Absent or Ile
  misc_feature (1767)..(1767): Absent or Val
  misc_feature (1768)..(1768): Absent or Ala
  misc_feature (1769)..(1769): Absent or Leu
  misc_feature (1770)..(1770): Absent or Leu
  misc_feature (1771)..(1771): Absent or Asp
  misc_feature (1772)..(1772): Absent or Glu
  misc_feature (1773)..(1773): Absent or Ala
  misc_feature (1774)..(1774): Absent or Cys
  misc_feature (1775)..(1775): Absent or Met
  misc_feature (1776)..(1776): Absent or Phe
  misc_feature (1777)..(1777): Absent or Pro
  misc_feature (1778)..(1778): Absent or Lys
  misc_feature (1779)..(1779): Absent or Ser
  misc_feature (1780)..(1780): Absent or Thr
  misc_feature (1781)..(1781): Absent or His
  misc_feature (1782)..(1782): Absent or Glu
  misc_feature (1783)..(1783): Absent or Thr
  misc_feature (1784)..(1784): Absent or Phe
  misc_feature (1785)..(1785): Absent or Ala
  misc_feature (1786)..(1786): Absent or Asn
  misc_feature (1787)..(1787): Absent or Lys
  misc_feature (1788)..(1788): Absent or Leu
  misc_feature (1789)..(1789): Absent or Tyr
  misc_feature (1790)..(1790): Absent or Gln
  misc_feature (1791)..(1791): Absent or Thr
  misc_feature (1792)..(1792): Absent or Phe
  misc_feature (1793)..(1793): Absent or Lys
  misc_feature (1794)..(1794): Absent or Thr
  misc_feature (1795)..(1795): Absent or His
  misc_feature (1796)..(1796): Absent or Lys
  misc_feature (1797)..(1797): Absent or Arg
  misc_feature (1798)..(1798): Absent or Phe
  misc_feature (1799)..(1799): Absent or Ile
  misc_feature (1800)..(1800): Absent or Lys
  misc_feature (1801)..(1801): Absent or Pro
  misc_feature (1802)..(1802): Absent or Lys
  misc_feature (1803)..(1803): Absent or Leu
  misc_feature (1804)..(1804): Absent or Ser
  misc_feature (1805)..(1805): Absent or Arg
  misc_feature (1806)..(1806): Absent or Thr
  misc_feature (1807)..(1807): Absent or Asp
  misc_feature (1808)..(1808): Absent or Phe
  misc_feature (1809)..(1809): Absent or Ala
  misc_feature (1810)..(1810): Absent or Val
  misc_feature (1811)..(1811): Absent or Ala
  misc_feature (1812)..(1812): Absent or His
  misc_feature (1813)..(1813): Absent or Tyr
  misc_feature (1814)..(1814): Absent or Ala
  misc_feature (1815)..(1815): Absent or Gly
  misc_feature (1816)..(1816): Absent or Glu
  misc_feature (1817)..(1817): Absent or Val
  misc_feature (1818)..(1818): Absent or Leu
  misc_feature (1819)..(1819): Absent or Tyr
  misc_feature (1820)..(1820): Absent or Gln
  misc_feature (1821)..(1821): Absent or Ser
  misc_feature (1822)..(1822): Absent or Glu
  misc_feature (1823)..(1823): Absent or Leu
  misc_feature (1824)..(1824): Absent or Phe
  misc_feature (1825)..(1825): Absent or Leu
  misc_feature (1826)..(1826): Absent or Asp
  misc_feature (1827)..(1827): Absent or Lys
  misc_feature (1828)..(1828): Absent or Asn
  misc_feature (1829)..(1829): Absent or Lys
  misc_feature (1830)..(1830): Absent or Asp
  misc_feature (1831)..(1831): Absent or Tyr
  misc_feature (1832)..(1832): Absent or Val
  misc_feature (1833)..(1833): Absent or Ile
  misc_feature (1834)..(1834): Absent or Pro
  misc_feature (1835)..(1835): Absent or Glu
  misc_feature (1836)..(1836): Absent or His
  misc_feature (1837)..(1837): Absent or Gln
  misc_feature (1838)..(1838): Absent or Asp
  misc_feature (1839)..(1839): Absent or Leu
  misc_feature (1840)..(1840): Absent or Leu
  misc_feature (1841)..(1841): Absent or Gly
  misc_feature (1842)..(1842): Absent or Ala
  misc_feature (1843)..(1843): Absent or Ser
  misc_feature (1844)..(1844): Absent or Lys
  misc_feature (1845)..(1845): Absent or Cys
  misc_feature (1846)..(1846): Absent or Pro
  misc_feature (1847)..(1847): Absent or Phe
  misc_feature (1848)..(1848): Absent or Val
  misc_feature (1849)..(1849): Absent or Val
  misc_feature (1850)..(1850): Absent or Gly
  misc_feature (1851)..(1851): Absent or Leu
  misc_feature (1852)..(1852): Absent or Phe
  misc_feature (1853)..(1853): Absent or Pro
  misc_feature (1854)..(1854): Absent or Pro
  misc_feature (1855)..(1855): Absent or Leu
  misc_feature (1856)..(1856): Absent or Pro
  misc_feature (1857)..(1857): Absent or Glu
  misc_feature (1858)..(1858): Absent or Glu
  misc_feature (1859)..(1859): Absent or Thr
  misc_feature (1860)..(1860): Absent or Ser
  misc_feature (1861)..(1861): Absent or Lys
  misc_feature (1862)..(1862): Absent or Ser
  misc_feature (1863)..(1863): Absent or Ser
  misc_feature (1864)..(1864): Absent or Lys
  misc_feature (1865)..(1865): Absent or Phe
  misc_feature (1866)..(1866): Absent or Ser
  misc_feature (1867)..(1867): Absent or Ser
  misc_feature (1868)..(1868): Absent or Ile
  misc_feature (1869)..(1869): Absent or Gly
  misc_feature (1870)..(1870): Absent or Ser
  misc_feature (1871)..(1871): Absent or Arg
  misc_feature (1872)..(1872): Absent or Phe
  misc_feature (1873)..(1873): Absent or Lys
  misc_feature (1874)..(1874): Absent or Leu
  misc_feature (1875)..(1875): Absent or Gln
  misc_feature (1876)..(1876): Absent or Leu
  misc_feature (1877)..(1877): Absent or Gln
  misc_feature (1878)..(1878): Absent or Gln
  misc_feature (1879)..(1879): Absent or Leu
  misc_feature (1880)..(1880): Absent or Met
  misc_feature (1881)..(1881): Absent or Glu
  misc_feature (1882)..(1882): Absent or Thr
  misc_feature (1883)..(1883): Absent or Leu
  misc_feature (1884)..(1884): Absent or Asn
  misc_feature (1885)..(1885): Absent or Cys
  misc_feature (1886)..(1886): Absent or Thr
  misc_feature (1887)..(1887): Absent or Glu
  misc_feature (1888)..(1888): Absent or Pro
  misc_feature (1889)..(1889): Absent or His
  misc_feature (1890)..(1890): Absent or Tyr
  misc_feature (1891)..(1891): Absent or Ile
  misc_feature (1892)..(1892): Absent or Arg
  misc_feature (1893)..(1893): Absent or Cys
  misc_feature (1894)..(1894): Absent or Val
  misc_feature (1895)..(1895): Absent or Lys
  misc_feature (1896)..(1896): Absent or Pro
  misc_feature (1897)..(1897): Absent or Asn
  misc_feature (1898)..(1898): Absent or Asn
  misc_feature (1899)..(1899): Absent or Leu
  misc_feature (1900)..(1900): Absent or Leu
  misc_feature (1901)..(1901): Absent or Lys
  misc_feature (1902)..(1902): Absent or Pro
  misc_feature (1903)..(1903): Absent or Ala
  misc_feature (1904)..(1904): Absent or Ile
  misc_feature (1905)..(1905): Absent or Phe
  misc_feature (1906)..(1906): Absent or Glu
  misc_feature (1907)..(1907): Absent or Asn
  misc_feature (1908)..(1908): Absent or Val
  misc_feature (1909)..(1909): Absent or Asn
  misc_feature (1910)..(1910): Absent or Ile
  misc_feature (1911)..(1911): Absent or Met
  misc_feature (1912)..(1912): Absent or Gln
  misc_feature (1913)..(1913): Absent or Gln
  misc_feature (1914)..(1914): Absent or Leu
  misc_feature (1915)..(1915): Absent or Arg
  misc_feature (1916)..(1916): Absent or Cys
  misc_feature (1917)..(1917): Absent or Gly
  misc_feature (1918)..(1918): Absent or Gly
  misc_feature (1919)..(1919): Absent or Val
  misc_feature (1920)..(1920): Absent or Leu
  misc_feature (1921)..(1921): Absent or Glu
  misc_feature (1922)..(1922): Absent or Ala
  misc_feature (1923)..(1923): Absent or Ile
  misc_feature (1924)..(1924): Absent or Arg
  misc_feature (1925)..(1925): Absent or Ile
  misc_feature (1926)..(1926): Absent or Ser
  misc_feature (1927)..(1927): Absent or Cys
  misc_feature (1928)..(1928): Absent or Ala
  misc_feature (1929)..(1929): Absent or Gly
  misc_feature (1930)..(1930): Absent or Tyr
  misc_feature (1931)..(1931): Absent or Pro
  misc_feature (1932)..(1932): Absent or Thr
  misc_feature (1933)..(1933): Absent or Arg
  misc_feature (1934)..(1934): Absent or Lys
  misc_feature (1935)..(1935): Absent or Pro
  misc_feature (1936)..(1936): Absent or Phe
  misc_feature (1937)..(1937): Absent or Phe
  misc_feature (1938)..(1938): Absent or Glu
  misc_feature (1939)..(1939): Absent or Phe
  misc_feature (1940)..(1940): Absent or Ile
  misc_feature (1941)..(1941): Absent or Asn
  misc_feature (1942)..(1942): Absent or Arg
  misc_feature (1943)..(1943): Absent or Phe
  misc_feature (1944)..(1944): Absent or Gly
  misc_feature (1945)..(1945): Absent or Leu
  misc_feature (1946)..(1946): Absent or Leu
  misc_feature (1947)..(1947): Absent or Ser
  misc_feature (1948)..(1948): Absent or Pro
  misc_feature (1949)..(1949): Absent or Ala
  misc_feature (1950)..(1950): Absent or Ala
  misc_feature (1951)..(1951): Absent or Leu
  misc_feature (1952)..(1952): Absent or Glu
  misc_feature (1953)..(1953): Absent or Gly
  misc_feature (1954)..(1954): Absent or Asn
  misc_feature (1955)..(1955): Absent or Phe
  misc_feature (1956)..(1956): Absent or Asp
  misc_feature (1957)..(1957): Absent or Glu
  misc_feature (1958)..(1958): Absent or Lys
  misc_feature (1959)..(1959): Absent or Val
  misc_feature (1960)..(1960): Absent or Ala
  misc_feature (1961)..(1961): Absent or Cys
  misc_feature (1962)..(1962): Absent or Gln
  misc_feature (1963)..(1963): Absent or Lys
  misc_feature (1964)..(1964): Absent or Ile
  misc_feature (1965)..(1965): Absent or Leu
  misc_feature (1966)..(1966): Absent or Asp
  misc_feature (1967)..(1967): Absent or Asn
  misc_feature (1968)..(1968): Absent or Met
  misc_feature (1969)..(1969): Absent or Gly
  misc_feature (1970)..(1970): Absent or Leu
  misc_feature (1971)..(1971): Absent or Lys
  misc_feature (1972)..(1972): Absent or Gly
  misc_feature (1973)..(1973): Absent or Tyr
  misc_feature (1974)..(1974): Absent or Gln
  misc_feature (1975)..(1975): Absent or Ile
  misc_feature (1976)..(1976): Absent or Gly
  misc_feature (1977)..(1977): Absent or Lys
  misc_feature (1978)..(1978): Absent or Thr
  misc_feature (1979)..(1979): Absent or Lys
  misc_feature (1980)..(1980): Absent or Val
  misc_feature (1981)..(1981): Absent or Phe
  misc_feature (1982)..(1982): Absent or Leu
  misc_feature (1983)..(1983): Absent or Arg
  misc_feature (1984)..(1984): Absent or Ala
  misc_feature (1985)..(1985): Absent or Gly
  misc_feature (1986)..(1986): Absent or Gln
  misc_feature (1987)..(1987): Absent or Met
  misc_feature (1988)..(1988): Absent or Ala
  misc_feature (1989)..(1989): Absent or Glu
  misc_feature (1990)..(1990): Absent or Leu
  misc_feature (1991)..(1991): Absent or Asp
  misc_feature (1992)..(1992): Absent or Ala
  misc_feature (1993)..(1993): Absent or Arg
  misc_feature (1994)..(1994): Absent or Arg
  misc_feature (1995)..(1995): Absent or Ala
  misc_feature (1996)..(1996): Absent or Glu
  misc_feature (1997)..(1997): Absent or Val
  misc_feature (1998)..(1998): Absent or Leu
  misc_feature (1999)..(1999): Absent or Ser
  misc_feature (2000)..(2000): Absent or Ser
  misc_feature (2001)..(2001): Absent or Ala
  misc_feature (2002)..(2002): Absent or Ala
  misc_feature (2003)..(2003): Absent or Lys
  misc_feature (2004)..(2004): Absent or Lys
  misc_feature (2005)..(2005): Absent or Ile
  misc_feature (2006)..(2006): Absent or Gln
  misc_feature (2007)..(2007): Absent or Arg
  misc_feature (2008)..(2008): Absent or Arg
  misc_feature (2009)..(2009): Absent or Ile
  misc_feature (2010)..(2010): Absent or Arg
  misc_feature (2011)..(2011): Absent or Thr
  misc_feature (2012)..(2012): Absent or His
  misc_feature (2013)..(2013): Absent or Gln
  misc_feature (2014)..(2014): Absent or Ala
  misc_feature (2015)..(2015): Absent or Gln
  misc_feature (2016)..(2016): Absent or Lys
  misc_feature (2017)..(2017): Absent or Arg
  misc_feature (2018)..(2018): Absent or Phe
  misc_feature (2019)..(2019): Absent or Ile
  misc_feature (2020)..(2020): Absent or Val
  misc_feature (2021)..(2021): Absent or Leu
  misc_feature (2022)..(2022): Absent or Arg
  misc_feature (2023)..(2023): Absent or Lys
  misc_feature (2024)..(2024): Absent or Ala
  misc_feature (2025)..(2025): Absent or Thr
  misc_feature (2026)..(2026): Absent or Ile
  misc_feature (2027)..(2027): Absent or Ser
  misc_feature (2028)..(2028): Absent or Leu
  misc_feature (2029)..(2029): Absent or Gln
  misc_feature (2030)..(2030): Absent or Ala
  misc_feature (2031)..(2031): Absent or Ile
  misc_feature (2032)..(2032): Absent or Cys
  misc_feature (2033)..(2033): Absent or Arg
  misc_feature (2034)..(2034): Absent or Gly
  misc_feature (2035)..(2035): Absent or Arg
  misc_feature (2036)..(2036): Absent or Leu
  misc_feature (2037)..(2037): Absent or Ser
  misc_feature (2038)..(2038): Absent or Cys
  misc_feature (2039)..(2039): Absent or Lys
  misc_feature (2040)..(2040): Absent or His
  misc_feature (2041)..(2041): Absent or Tyr
  misc_feature (2042)..(2042): Absent or Asp
  misc_feature (2043)..(2043): Absent or Asn
  misc_feature (2044)..(2044): Absent or Leu
  misc_feature (2045)..(2045): Absent or Arg
  misc_feature (2046)..(2046): Absent or Arg
  misc_feature (2047)..(2047): Absent or Glu
  misc_feature (2048)..(2048): Absent or Ala
  misc_feature (2049)..(2049): Absent or Ala
  misc_feature (2050)..(2050): Absent or Ala
  misc_feature (2051)..(2051): Absent or Val
  misc_feature (2052)..(2052): Absent or Lys
  misc_feature (2053)..(2053): Absent or Ile
  misc_feature (2054)..(2054): Absent or Gln
  misc_feature (2055)..(2055): Absent or Lys
  misc_feature (2056)..(2056): Absent or Asn
  misc_feature (2057)..(2057): Absent or Gly
  misc_feature (2058)..(2058): Absent or Arg
  misc_feature (2059)..(2059): Absent or Arg
  misc_feature (2060)..(2060): Absent or His
  misc_feature (2061)..(2061): Absent or Tyr
  misc_feature (2062)..(2062): Absent or Ser
  misc_feature (2063)..(2063): Absent or Arg
  misc_feature (2064)..(2064): Absent or Lys
  misc_feature (2065)..(2065): Absent or Ser
  misc_feature (2066)..(2066): Absent or Tyr
  misc_feature (2067)..(2067): Absent or Lys
  misc_feature (2068)..(2068): Absent or Lys
  misc_feature (2069)..(2069): Absent or Leu
  misc_feature (2070)..(2070): Absent or His
  misc_feature (2071)..(2071): Absent or Val
  misc_feature (2072)..(2072): Absent or Ala
  misc_feature (2073)..(2073): Absent or Ser
  misc_feature (2074)..(2074): Absent or Leu
  misc_feature (2075)..(2075): Absent or Val
  misc_feature (2076)..(2076): Absent or Val
  misc_feature (2077)..(2077): Absent or Gln
  misc_feature (2078)..(2078): Absent or Thr
  misc_feature (2079)..(2079): Absent or Gly
  misc_feature (2080)..(2080): Absent or Leu
  misc_feature (2081)..(2081): Absent or Arg
  misc_feature (2082)..(2082): Absent or Ala
  misc_feature (2083)..(2083): Absent or Met
  misc_feature (2084)..(2084): Absent or Ala
  misc_feature (2085)..(2085): Absent or Ala
  misc_feature (2086)..(2086): Absent or Arg
  misc_feature (2087)..(2087): Absent or Lys
  misc_feature (2088)..(2088): Absent or Gln
  misc_feature (2089)..(2089): Absent or Phe
  misc_feature (2090)..(2090): Absent or Arg
  misc_feature (2091)..(2091): Absent or Phe
  misc_feature (2092)..(2092): Absent or Arg
  misc_feature (2093)..(2093): Absent or Lys
  misc_feature (2094)..(2094): Absent or Gln
  misc_feature (2095)..(2095): Absent or Thr
  misc_feature (2096)..(2096): Absent or Lys
  misc_feature (2097)..(2097): Absent or Ala
  misc_feature (2098)..(2098): Absent or Ala
  misc_feature (2099)..(2099): Absent or Thr
  misc_feature (2100)..(2100): Absent or Ile
  misc_feature (2101)..(2101): Absent or Val
  misc_feature (2102)..(2102): Absent or Gln
  misc_feature (2103)..(2103): Absent or Ala
  misc_feature (2104)..(2104): Absent or Gln
  misc_feature (2105)..(2105): Absent or Trp
  misc_feature (2106)..(2106): Absent or Arg
  misc_feature (2107)..(2107): Absent or Cys
  misc_feature (2108)..(2108): Absent or His
  misc_feature (2109)..(2109): Absent or Arg
  misc_feature (2110)..(2110): Absent or Ala
  misc_feature (2111)..(2111): Absent or Ile
  misc_feature (2112)..(2112): Absent or Ser
  misc_feature (2113)..(2113): Absent or Tyr
  misc_feature (2114)..(2114): Absent or Tyr
  misc_feature (2115)..(2115): Absent or Lys
  misc_feature (2116)..(2116): Absent or Lys
  misc_feature (2117)..(2117): Absent or Leu
  misc_feature (2118)..(2118): Absent or Lys
  misc_feature (2119)..(2119): Absent or Asn
  misc_feature (2120)..(2120): Absent or Gly
  misc_feature (2121)..(2121): Absent or Val
  misc_feature (2122)..(2122): Absent or Val
  misc_feature (2123)..(2123): Absent or Leu
  misc_feature (2124)..(2124): Absent or Ser
  misc_feature (2125)..(2125): Absent or Gln
  misc_feature (2126)..(2126): Absent or Thr
  misc_feature (2127)..(2127): Absent or Arg
  misc_feature (2128)..(2128): Absent or Trp
  misc_feature (2129)..(2129): Absent or Arg
  misc_feature (2130)..(2130): Absent or Gly
  misc_feature (2131)..(2131): Absent or Arg
  misc_feature (2132)..(2132): Absent or Leu
  misc_feature (2133)..(2133): Absent or Ala
  misc_feature (2134)..(2134): Absent or Lys
  misc_feature (2135)..(2135): Absent or Arg
  misc_feature (2136)..(2136): Absent or Glu
  misc_feature (2137)..(2137): Absent or Leu
  misc_feature (2138)..(2138): Absent or Arg
  misc_feature (2139)..(2139): Absent or Lys
  misc_feature (2140)..(2140): Absent or Leu
  misc_feature (2141)..(2141): Absent or Lys
  misc_feature (2142)..(2142): Absent or Met
  misc_feature (2143)..(2143): Absent or Ala
  misc_feature (2144)..(2144): Absent or Ala
  misc_feature (2145)..(2145): Absent or Arg
  misc_feature (2146)..(2146): Absent or Glu
  misc_feature (2147)..(2147): Absent or Thr
  misc_feature (2148)..(2148): Absent or Gly
  misc_feature (2149)..(2149): Absent or Ala
  misc_feature (2150)..(2150): Absent or Leu
  misc_feature (2151)..(2151): Absent or Lys
  misc_feature (2152)..(2152): Absent or Glu
  misc_feature (2153)..(2153): Absent or Ala
  misc_feature (2154)..(2154): Absent or Lys
  misc_feature (2155)..(2155): Absent or Asp
  misc_feature (2156)..(2156): Absent or Met
  misc_feature (2157)..(2157): Absent or Leu
  misc_feature (2158)..(2158): Absent or Glu
  misc_feature (2159)..(2159): Absent or Lys
  misc_feature (2160)..(2160): Absent or Lys
  misc_feature (2161)..(2161): Absent or Val
  misc_feature (2162)..(2162): Absent or Glu
  misc_feature (2163)..(2163): Absent or Glu
  misc_feature (2164)..(2164): Absent or Leu
  misc_feature (2165)..(2165): Absent or Thr
  misc_feature (2166)..(2166): Absent or Tyr
  misc_feature (2167)..(2167): Absent or Arg
  misc_feature (2168)..(2168): Absent or Val
  misc_feature (2169)..(2169): Absent or Gln
  misc_feature (2170)..(2170): Absent or Leu
  misc_feature (2171)..(2171): Absent or Glu
  misc_feature (2172)..(2172): Absent or Lys
  misc_feature (2173)..(2173): Absent or Arg
  misc_feature (2174)..(2174): Absent or Ser
  misc_feature (2175)..(2175): Absent or Arg
  misc_feature (2176)..(2176): Absent or Gly
  misc_feature (2177)..(2177): Absent or Asp
  misc_feature (2178)..(2178): Absent or Leu
  misc_feature (2179)..(2179): Absent or Glu
  misc_feature (2180)..(2180): Absent or Glu
  misc_feature (2181)..(2181): Absent or Ala
  misc_feature (2182)..(2182): Absent or Lys
  misc_feature (2183)..(2183): Absent or Thr
  misc_feature (2184)..(2184): Absent or Gln
  misc_feature (2185)..(2185): Absent or Glu
  misc_feature (2186)..(2186): Absent or Ile
  misc_feature (2187)..(2187): Absent or Leu
  misc_feature (2188)..(2188): Absent or Lys
  misc_feature (2189)..(2189): Absent or Leu
  misc_feature (2190)..(2190): Absent or Lys
  misc_feature (2191)..(2191): Absent or Ser
  misc_feature (2192)..(2192): Absent or Ser
  misc_feature (2193)..(2193): Absent or Phe
  misc_feature (2194)..(2194): Absent or Glu
  misc_feature (2195)..(2195): Absent or Glu
  misc_feature (2196)..(2196): Absent or Met
  misc_feature (2197)..(2197): Absent or Arg
  misc_feature (2198)..(2198): Absent or Lys
  misc_feature (2199)..(2199): Absent or Lys
  misc_feature (2200)..(2200): Absent or Val
  misc_feature (2201)..(2201): Absent or Asp
  misc_feature (2202)..(2202): Absent or Glu
  misc_feature (2203)..(2203): Absent or Thr
  misc_feature (2204)..(2204): Absent or Asn
  misc_feature (2205)..(2205): Absent or Ala
  misc_feature (2206)..(2206): Absent or Leu
  misc_feature (2207)..(2207): Absent or Leu
  misc_feature (2208)..(2208): Absent or Leu
  misc_feature (2209)..(2209): Absent or Lys
  misc_feature (2210)..(2210): Absent or Glu
  misc_feature (2211)..(2211): Absent or Arg
  misc_feature (2212)..(2212): Absent or Glu
  misc_feature (2213)..(2213): Absent or Ala
  misc_feature (2214)..(2214): Absent or Ala
  misc_feature (2215)..(2215): Absent or Lys
  misc_feature (2216)..(2216): Absent or Lys
  misc_feature (2217)..(2217): Absent or Ala
  misc_feature (2218)..(2218): Absent or Ala
  misc_feature (2219)..(2219): Absent or Glu
  misc_feature (2220)..(2220): Absent or Glu
  misc_feature (2221)..(2221): Absent or Ala
  misc_feature (2222)..(2222): Absent or Pro
  misc_feature (2223)..(2223): Absent or Pro
  misc_feature (2224)..(2224): Absent or Val
  misc_feature (2225)..(2225): Absent or Ile
  misc_feature (2226)..(2226): Absent or Lys
  misc_feature (2227)..(2227): Absent or Glu
  misc_feature (2228)..(2228): Absent or Thr
  misc_feature (2229)..(2229): Absent or Gln
  misc_feature (2230)..(2230): Absent or Ile
  misc_feature (2231)..(2231): Absent or Leu
  misc_feature (2232)..(2232): Absent or Val
  misc_feature (2233)..(2233): Absent or Glu
  misc_feature (2234)..(2234): Absent or Asp
  misc_feature (2235)..(2235): Absent or Thr
  misc_feature (2236)..(2236): Absent or Lys
  misc_feature (2237)..(2237): Absent or Lys
  misc_feature (2238)..(2238): Absent or Ile
  misc_feature (2239)..(2239): Absent or Glu
  misc_feature (2240)..(2240): Absent or Leu
  misc_feature (2241)..(2241): Absent or Met
  misc_feature (2242)..(2242): Absent or Thr
  misc_feature (2243)..(2243): Absent or Glu
  misc_feature (2244)..(2244): Absent or Glu
  misc_feature (2245)..(2245): Absent or Leu
  misc_feature (2246)..(2246): Absent or Glu
  misc_feature (2247)..(2247): Absent or Ser
  misc_feature (2248)..(2248): Absent or Val
  misc_feature (2249)..(2249): Absent or Lys
  misc_feature (2250)..(2250): Absent or Val
  misc_feature (2251)..(2251): Absent or Thr
  misc_feature (2252)..(2252): Absent or Leu
  misc_feature (2253)..(2253): Absent or Glu
  misc_feature (2254)..(2254): Absent or Asn
  misc_feature (2255)..(2255): Absent or Glu
  misc_feature (2256)..(2256): Absent or Lys
  misc_feature (2257)..(2257): Absent or Gln
  misc_feature (2258)..(2258): Absent or Arg
  misc_feature (2259)..(2259): Absent or Ala
  misc_feature (2260)..(2260): Absent or Asp
  misc_feature (2261)..(2261): Absent or Asp
  misc_feature (2262)..(2262): Absent or Ala
  misc_feature (2263)..(2263): Absent or Val
  misc_feature (2264)..(2264): Absent or Arg
  misc_feature (2265)..(2265): Absent or Lys
  misc_feature (2266)..(2266): Absent or Phe
  misc_feature (2267)..(2267): Absent or Glu
  misc_feature (2268)..(2268): Absent or Glu
  misc_feature (2269)..(2269): Absent or Ala
  misc_feature (2270)..(2270): Absent or Gln
  misc_feature (2271)..(2271): Absent or Glu
  misc_feature (2272)..(2272): Absent or Ser
  misc_feature (2273)..(2273): Absent or Leu
  misc_feature (2274)..(2274): Absent or Glu
  misc_feature (2275)..(2275): Absent or Asp
  misc_feature (2276)..(2276): Absent or Lys
  misc_feature (2277)..(2277): Absent or Lys
  misc_feature (2278)..(2278): Absent or Lys
  misc_feature (2279)..(2279): Absent or Lys
  misc_feature (2280)..(2280): Absent or Leu
  misc_feature (2281)..(2281): Absent or Glu
  misc_feature (2282)..(2282): Absent or Glu
  misc_feature (2283)..(2283): Absent or Thr
  misc_feature (2284)..(2284): Absent or Glu
  misc_feature (2285)..(2285): Absent or Lys
  misc_feature (2286)..(2286): Absent or Lys
  misc_feature (2287)..(2287): Absent or Gly
  misc_feature (2288)..(2288): Absent or Gln
  misc_feature (2289)..(2289): Absent or Gln
  misc_feature (2290)..(2290): Absent or Leu
  misc_feature (2291)..(2291): Absent or Gln
  misc_feature (2292)..(2292): Absent or Glu
  misc_feature (2293)..(2293): Absent or Ser
  misc_feature (2294)..(2294): Absent or Leu
  misc_feature (2295)..(2295): Absent or Thr
  misc_feature (2296)..(2296): Absent or Arg
  misc_feature (2297)..(2297): Absent or Met
  misc_feature (2298)..(2298): Absent or Glu
  misc_feature (2299)..(2299): Absent or Glu
  misc_feature (2300)..(2300): Absent or Lys
  misc_feature (2301)..(2301): Absent or Cys
  misc_feature (2302)..(2302): Absent or Ser
  misc_feature (2303)..(2303): Absent or Asn
  misc_feature (2304)..(2304): Absent or Leu
  misc_feature (2305)..(2305): Absent or Glu
  misc_feature (2306)..(2306): Absent or Ser
  misc_feature (2307)..(2307): Absent or Glu
  misc_feature (2308)..(2308): Absent or Asn
  misc_feature (2309)..(2309): Absent or Lys
  misc_feature (2310)..(2310): Absent or Val
  misc_feature (2311)..(2311): Absent or Leu
  misc_feature (2312)..(2312): Absent or Arg
  misc_feature (2313)..(2313): Absent or Gln
  misc_feature (2314)..(2314): Absent or Gln
  misc_feature (2315)..(2315): Absent or Ala
  misc_feature (2316)..(2316): Absent or Val
  misc_feature (2317)..(2317): Absent or Ser
  misc_feature (2318)..(2318): Absent or Met
  misc_feature (2319)..(2319): Absent or Ala
  misc_feature (2320)..(2320): Absent or Pro
  misc_feature (2321)..(2321): Absent or Asn
  misc_feature (2322)..(2322): Absent or Lys
  misc_feature (2323)..(2323): Absent or Phe
  misc_feature (2324)..(2324): Absent or Leu
  misc_feature (2325)..(2325): Absent or Ser
  misc_feature (2326)..(2326): Absent or Gly
  misc_feature (2327)..(2327): Absent or Arg
  misc_feature (2328)..(2328): Absent or Ser
  misc_feature (2329)..(2329): Absent or Arg
  misc_feature (2330)..(2330): Absent or Ser
  misc_feature (2331)..(2331): Absent or Ile
  misc_feature (2332)..(2332): Absent or Leu
  misc_feature (2333)..(2333): Absent or Gln
  misc_feature (2334)..(2334): Absent or Arg
  misc_feature (2335)..(2335): Absent or Gly
  misc_feature (2336)..(2336): Absent or Ser
  misc_feature (2337)..(2337): Absent or Glu
  misc_feature (2338)..(2338): Absent or Ser
  misc_feature (2339)..(2339): Absent or Gly
  misc_feature (2340)..(2340): Absent or His
  misc_feature (2341)..(2341): Absent or Leu
  misc_feature (2342)..(2342): Absent or Ala
  misc_feature (2343)..(2343): Absent or Val
  misc_feature (2344)..(2344): Absent or Asp
  misc_feature (2345)..(2345): Absent or Ala
  misc_feature (2346)..(2346): Absent or Arg
  misc_feature (2347)..(2347): Absent or Ser
  misc_feature (2348)..(2348): Absent or Asn
  misc_feature (2349)..(2349): Absent or Leu
  misc_feature (2350)..(2350): Absent or Asp
  misc_feature (2351)..(2351): Absent or Leu
  misc_feature (2352)..(2352): Absent or His
  misc_feature (2353)..(2353): Absent or Ser
  misc_feature (2354)..(2354): Absent or His
  misc_feature (2355)..(2355): Absent or Ser
  misc_feature (2356)..(2356): Absent or Ile
  misc_feature (2357)..(2357): Absent or Asn
  misc_feature (2358)..(2358): Absent or His
  misc_feature (2359)..(2359): Absent or Arg
  misc_feature (2360)..(2360): Absent or Asp
  misc_feature (2361)..(2361): Absent or Pro
  misc_feature (2362)..(2362): Absent or Ser
  misc_feature (2363)..(2363): Absent or Glu
  misc_feature (2364)..(2364): Absent or Val
  misc_feature (2365)..(2365): Absent or Glu
  misc_feature (2366)..(2366): Absent or Asp
  misc_feature (2367)..(2367): Absent or Lys
  misc_feature (2368)..(2368): Absent or Pro
  misc_feature (2369)..(2369): Absent or Gln
  misc_feature (2370)..(2370): Absent or Lys
  misc_feature (2371)..(2371): Absent or Ser
  misc_feature (2372)..(2372): Absent or Leu
  misc_feature (2373)..(2373): Absent or Asn
  misc_feature (2374)..(2374): Absent or Glu
  misc_feature (2375)..(2375): Absent or Lys
  misc_feature (2376)..(2376): Absent or Gln
  misc_feature (2377)..(2377): Absent or Gln
  misc_feature (2378)..(2378): Absent or Glu
  misc_feature (2379)..(2379): Absent or Asn
  misc_feature (2380)..(2380): Absent or Gln
  misc_feature (2381)..(2381): Absent or Asp
  misc_feature (2382)..(2382): Absent or Leu
  misc_feature (2383)..(2383): Absent or Leu
  misc_feature (2384)..(2384): Absent or Ile
  misc_feature (2385)..(2385): Absent or Arg
  misc_feature (2386)..(2386): Absent or Ser
  misc_feature (2387)..(2387): Absent or Ile
  misc_feature (2388)..(2388): Absent or Val
  misc_feature (2389)..(2389): Absent or Gln
  misc_feature (2390)..(2390): Absent or His
  misc_feature (2391)..(2391): Absent or Leu
  misc_feature (2392)..(2392): Absent or Gly
  misc_feature (2393)..(2393): Absent or Phe
  misc_feature (2394)..(2394): Absent or Gln
  misc_feature (2395)..(2395): Absent or Gly
  misc_feature (2396)..(2396): Absent or Asn
  misc_feature (2397)..(2397): Absent or Arg
  misc_feature (2398)..(2398): Absent or Pro
  misc_feature (2399)..(2399): Absent or Ile
  misc_feature (2400)..(2400): Absent or Thr
  misc_feature (2401)..(2401): Absent or Ala
  misc_feature (2402)..(2402): Absent or Cys
  misc_feature (2403)..(2403): Absent or Ile
  misc_feature (2404)..(2404): Absent or Ile
  misc_feature (2405)..(2405): Absent or Tyr
  misc_feature (2406)..(2406): Absent or Lys
  misc_feature (2407)..(2407): Absent or Cys
  misc_feature (2408)..(2408): Absent or Leu
  misc_feature (2409)..(2409): Absent or Leu
  misc_feature (2410)..(2410): Absent or Gln
  misc_feature (2411)..(2411): Absent or Trp
  misc_feature (2412)..(2412): Absent or Arg
  misc_feature (2413)..(2413): Absent or Ser
  misc_feature (2414)..(2414): Absent or Phe
  misc_feature (2415)..(2415): Absent or Glu
  misc_feature (2416)..(2416): Absent or Val
  misc_feature (2417)..(2417): Absent or Glu
  misc_feature (2418)..(2418): Absent or Arg
  misc_feature (2419)..(2419): Absent or Thr
  misc_feature (2420)..(2420): Absent or Ser
  misc_feature (2421)..(2421): Absent or Val
  misc_feature (2422)..(2422): Absent or Phe
  misc_feature (2423)..(2423): Absent or Asp
  misc_feature (2424)..(2424): Absent or Arg
  misc_feature (2425)..(2425): Absent or Ile
  misc_feature (2426)..(2426): Absent or Ile
  misc_feature (2427)..(2427): Absent or Gln
  misc_feature (2428)..(2428): Absent or Thr
  misc_feature (2429)..(2429): Absent or Ile
  misc_feature (2430)..(2430): Absent or Gly
  misc_feature (2431)..(2431): Absent or His
  misc_feature (2432)..(2432): Absent or Ala
  misc_feature (2433)..(2433): Absent or Ile
  misc_feature (2434)..(2434): Absent or Glu
  misc_feature (2435)..(2435): Absent or Thr
  misc_feature (2436)..(2436): Absent or Gln
  misc_feature (2437)..(2437): Absent or Asp
  misc_feature (2438)..(2438): Absent or Asn
  misc_feature (2439)..(2439): Absent or Asn
  misc_feature (2440)..(2440): Absent or Asn
  misc_feature (2441)..(2441): Absent or Thr
  misc_feature (2442)..(2442): Absent or Leu
  misc_feature (2443)..(2443): Absent or Ala
  misc_feature (2444)..(2444): Absent or Tyr
  misc_feature (2445)..(2445): Absent or Trp
  misc_feature (2446)..(2446): Absent or Leu
  misc_feature (2447)..(2447): Absent or Ser
  misc_feature (2448)..(2448): Absent or Asn
  misc_feature (2449)..(2449): Absent or Thr
  misc_feature (2450)..(2450): Absent or Ser
  misc_feature (2451)..(2451): Absent or Thr
  misc_feature (2452)..(2452): Absent or Leu
  misc_feature (2453)..(2453): Absent or Leu
  misc_feature (2454)..(2454): Absent or Leu
  misc_feature (2455)..(2455): Absent or Leu
  misc_feature (2456)..(2456): Absent or Leu
  misc_feature (2457)..(2457): Absent or Gln
  misc_feature (2458)..(2458): Absent or Arg
  misc_feature (2459)..(2459): Absent or Thr
  misc_feature (2460)..(2460): Absent or Leu
  misc_feature (2461)..(2461): Absent or Lys
  misc_feature (2462)..(2462): Absent or Ala
  misc_feature (2463)..(2463): Absent or Ser
  misc_feature (2464)..(2464): Absent or Gly
  misc_feature (2465)..(2465): Absent or Ala
  misc_feature (2466)..(2466): Absent or Ala
  misc_feature (2467)..(2467): Absent or Gly
  misc_feature (2468)..(2468): Absent or Met
  misc_feature (2469)..(2469): Absent or Ala
  misc_feature (2470)..(2470): Absent or Pro
  misc_feature (2471)..(2471): Absent or Gln
  misc_feature (2472)..(2472): Absent or Arg
  misc_feature (2473)..(2473): Absent or Arg
  misc_feature (2474)..(2474): Absent or Arg
  misc_feature (2475)..(2475): Absent or Ser
  misc_feature (2476)..(2476): Absent or Ser
  misc_feature (2477)..(2477): Absent or Ser
  misc_feature (2478)..(2478): Absent or Ala
  misc_feature (2479)..(2479): Absent or Thr
  misc_feature (2480)..(2480): Absent or Leu
  misc_feature (2481)..(2481): Absent or Phe
  misc_feature (2482)..(2482): Absent or Gly
  misc_feature (2483)..(2483): Absent or Arg
  misc_feature (2484)..(2484): Absent or Met
  misc_feature (2485)..(2485): Absent or Ser
  misc_feature (2486)..(2486): Absent or Gln
  misc_feature (2487)..(2487): Absent or Ser
  misc_feature (2488)..(2488): Absent or Phe
  misc_feature (2489)..(2489): Absent or Arg
  misc_feature (2490)..(2490): Absent or Gly
  misc_feature (2491)..(2491): Absent or Ala
  misc_feature (2492)..(2492): Absent or Pro
  misc_feature (2493)..(2493): Absent or Pro
  misc_feature (2494)..(2494): Absent or Gly
  misc_feature (2495)..(2495): Absent or Val
  misc_feature (2496)..(2496): Absent or Asn
  misc_feature (2497)..(2497): Absent or Leu
  misc_feature (2498)..(2498): Absent or Ala
  misc_feature (2499)..(2499): Absent or Met
  misc_feature (2500)..(2500): Absent or Ile
  misc_feature (2501)..(2501): Absent or Asn
  misc_feature (2502)..(2502): Absent or Gly
  misc_feature (2503)..(2503): Absent or Ala
  misc_feature (2504)..(2504): Absent or Ala
  misc_feature (2505)..(2505): Absent or Gly
  misc_feature (2506)..(2506): Absent or Gly
  misc_feature (2507)..(2507): Absent or Gly
  misc_feature (2508)..(2508): Absent or Ala
  misc_feature (2509)..(2509): Absent or Asp
  misc_feature (2510)..(2510): Absent or Thr
  misc_feature (2511)..(2511): Absent or Phe
  misc_feature (2512)..(2512): Absent or Arg
  misc_feature (2513)..(2513): Absent or Gln
  misc_feature (2514)..(2514): Absent or Val
  misc_feature (2515)..(2515): Absent or Glu
  misc_feature (2516)..(2516): Absent or Ala
  misc_feature (2517)..(2517): Absent or Lys
  misc_feature (2518)..(2518): Absent or Tyr
  misc_feature (2519)..(2519): Absent or Pro
  misc_feature (2520)..(2520): Absent or Ala
  misc_feature (2521)..(2521): Absent or Leu
  misc_feature (2522)..(2522): Absent or Leu
  misc_feature (2523)..(2523): Absent or Phe
  misc_feature (2524)..(2524): Absent or Lys
  misc_feature (2525)..(2525): Absent or Gln
  misc_feature (2526)..(2526): Absent or Gln
  misc_feature (2527)..(2527): Absent or Leu
  misc_feature (2528)..(2528): Absent or Thr
  misc_feature (2529)..(2529): Absent or Ala
  misc_feature (2530)..(2530): Absent or Tyr
  misc_feature (2531)..(2531): Absent or Val
  misc_feature (2532)..(2532): Absent or Glu
  misc_feature (2533)..(2533): Absent or Lys
  misc_feature (2534)..(2534): Absent or Ile
  misc_feature (2535)..(2535): Absent or Tyr
  misc_feature (2536)..(2536): Absent or Gly
  misc_feature (2537)..(2537): Absent or Met
  misc_feature (2538)..(2538): Absent or Ile
  misc_feature (2539)..(2539): Absent or Arg
  misc_feature (2540)..(2540): Absent or Asp
  misc_feature (2541)..(2541): Absent or Asn
  misc_feature (2542)..(2542): Absent or Leu
  misc_feature (2543)..(2543): Absent or Lys
  misc_feature (2544)..(2544): Absent or Lys
  misc_feature (2545)..(2545): Absent or Glu
  misc_feature (2546)..(2546): Absent or Ile
  misc_feature (2547)..(2547): Absent or Ser
  misc_feature (2548)..(2548): Absent or Pro
  misc_feature (2549)..(2549): Absent or Leu
  misc_feature (2550)..(2550): Absent or Leu
  misc_feature (2551)..(2551): Absent or Gly
  misc_feature (2552)..(2552): Absent or Leu
  misc_feature (2553)..(2553): Absent or Cys
  misc_feature (2554)..(2554): Absent or Ile
  misc_feature (2555)..(2555): Absent or Gln
  misc_feature (2556)..(2556): Absent or Ala
  misc_feature (2557)..(2557): Absent or Pro
  misc_feature (2558)..(2558): Absent or Arg
  misc_feature (2559)..(2559): Absent or Thr
  misc_feature (2560)..(2560): Absent or Ser
  misc_feature (2561)..(2561): Absent or Arg
  misc_feature (2562)..(2562): Absent or Ala
  misc_feature (2563)..(2563): Absent or Ser
  misc_feature (2564)..(2564): Absent or Leu
  misc_feature (2565)..(2565): Absent or Val
  misc_feature (2566)..(2566): Absent or Lys
  misc_feature (2567)..(2567): Absent or Gly
  misc_feature (2568)..(2568): Absent or Ala
  misc_feature (2569)..(2569): Absent or Ser
  misc_feature (2570)..(2570): Absent or Arg
  misc_feature (2571)..(2571): Absent or Ser
  misc_feature (2572)..(2572): Absent or Val
  misc_feature (2573)..(2573): Absent or Gly
  misc_feature (2574)..(2574): Absent or Asn
  misc_feature (2575)..(2575): Absent or Thr
  misc_feature (2576)..(2576): Absent or Ala
  misc_feature (2577)..(2577): Absent or Ala
  misc_feature (2578)..(2578): Absent or Gln
  misc_feature (2579)..(2579): Absent or Gln
  misc_feature (2580)..(2580): Absent or Ala
  misc_feature (2581)..(2581): Absent or Leu
  misc_feature (2582)..(2582): Absent or Ile
  misc_feature (2583)..(2583): Absent or Ala
  misc_feature (2584)..(2584): Absent or His
  misc_feature (2585)..(2585): Absent or Trp
  misc_feature (2586)..(2586): Absent or Gln
  misc_feature (2587)..(2587): Absent or Gly
  misc_feature (2588)..(2588): Absent or Ile
  misc_feature (2589)..(2589): Absent or Val
  misc_feature (2590)..(2590): Absent or Lys
  misc_feature (2591)..(2591): Absent or Ser
  misc_feature (2592)..(2592): Absent or Leu
  misc_feature (2593)..(2593): Absent or Thr
  misc_feature (2594)..(2594): Absent or Asn
  misc_feature (2595)..(2595): Absent or Phe
  misc_feature (2596)..(2596): Absent or Leu
  misc_feature (2597)..(2597): Absent or Asn
  misc_feature (2598)..(2598): Absent or Thr
  misc_feature (2599)..(2599): Absent or Leu
  misc_feature (2600)..(2600): Absent or Lys
  misc_feature (2601)..(2601): Absent or Ser
  misc_feature (2602)..(2602): Absent or Asn
  misc_feature (2603)..(2603): Absent or Asn
  misc_feature (2604)..(2604): Absent or Val
  misc_feature (2605)..(2605): Absent or Pro
  misc_feature (2606)..(2606): Absent or Ser
  misc_feature (2607)..(2607): Absent or Phe
  misc_feature (2608)..(2608): Absent or Leu
  misc_feature (2609)..(2609): Absent or Val
  misc_feature (2610)..(2610): Absent or Arg
  misc_feature (2611)..(2611): Absent or Lys
  misc_feature (2612)..(2612): Absent or Val
  misc_feature (2613)..(2613): Absent or Phe
  misc_feature (2614)..(2614): Absent or Thr
  misc_feature (2615)..(2615): Absent or Gln
  misc_feature (2616)..(2616): Absent or Ile
  misc_feature (2617)..(2617): Absent or Phe
  misc_feature (2618)..(2618): Absent or Ser
  misc_feature (2619)..(2619): Absent or Phe
  misc_feature (2620)..(2620): Absent or Ile
  misc_feature (2621)..(2621): Absent or Asn
  misc_feature (2622)..(2622): Absent or Val
  misc_feature (2623)..(2623): Absent or Gln
  misc_feature (2624)..(2624): Absent or Leu
  misc_feature (2625)..(2625): Absent or Phe
  misc_feature (2626)..(2626): Absent or Asn
  misc_feature (2627)..(2627): Absent or Ser
  misc_feature (2628)..(2628): Absent or Leu
  misc_feature (2629)..(2629): Absent or Leu
  misc_feature (2630)..(2630): Absent or Leu
  misc_feature (2631)..(2631): Absent or Arg
  misc_feature (2632)..(2632): Absent or Arg
  misc_feature (2633)..(2633): Absent or Glu
  misc_feature (2634)..(2634): Absent or Cys
  misc_feature (2635)..(2635): Absent or Cys
  misc_feature (2636)..(2636): Absent or Ser
  misc_feature (2637)..(2637): Absent or Phe
  misc_feature (2638)..(2638): Absent or Ser
  misc_feature (2639)..(2639): Absent or Asn
  misc_feature (2640)..(2640): Absent or Gly
  misc_feature (2641)..(2641): Absent or Glu
  misc_feature (2642)..(2642): Absent or Tyr
  misc_feature (2643)..(2643): Absent or Val
  misc_feature (2644)..(2644): Absent or Lys
  misc_feature (2645)..(2645): Absent or Ala
  misc_feature (2646)..(2646): Absent or Gly
  misc_feature (2647)..(2647): Absent or Leu
  misc_feature (2648)..(2648): Absent or Ser
  misc_feature (2649)..(2649): Absent or Glu
  misc_feature (2650)..(2650): Absent or Leu
  misc_feature (2651)..(2651): Absent or Glu
  misc_feature (2652)..(2652): Absent or His
  misc_feature (2653)..(2653): Absent or Trp
  misc_feature (2654)..(2654): Absent or Cys
  misc_feature (2655)..(2655): Absent or Phe
  misc_feature (2656)..(2656): Absent or Lys
  misc_feature (2657)..(2657): Absent or Ala
  misc_feature (2658)..(2658): Absent or Thr
  misc_feature (2659)..(2659): Absent or Asn
  misc_feature (2660)..(2660): Absent or Glu
  misc_feature (2661)..(2661): Absent or Tyr
  misc_feature (2662)..(2662): Absent or Ala
  misc_feature (2663)..(2663): Absent or Gly
  misc_feature (2664)..(2664): Absent or Ser
  misc_feature (2665)..(2665): Absent or Ser
  misc_feature (2666)..(2666): Absent or Trp
  misc_feature (2667)..(2667): Absent or Asp
  misc_feature (2668)..(2668): Absent or Glu
  misc_feature (2669)..(2669): Absent or Leu
  misc_feature (2670)..(2670): Absent or Lys
  misc_feature (2671)..(2671): Absent or His
  misc_feature (2672)..(2672): Absent or Ile
  misc_feature (2673)..(2673): Absent or Arg
  misc_feature (2674)..(2674): Absent or Gln
  misc_feature (2675)..(2675): Absent or Ala
  misc_feature (2676)..(2676): Absent or Ile
  misc_feature (2677)..(2677): Absent or Gly
  misc_feature (2678)..(2678): Absent or Phe
  misc_feature (2679)..(2679): Absent or Leu
  misc_feature (2680)..(2680): Absent or Val
  misc_feature (2681)..(2681): Absent or Val
  misc_feature (2682)..(2682): Absent or His
  misc_feature (2683)..(2683): Absent or Gln
  misc_feature (2684)..(2684): Absent or Lys
  misc_feature (2685)..(2685): Absent or Pro
  misc_feature (2686)..(2686): Absent or Lys
  misc_feature (2687)..(2687): Absent or Lys
  misc_feature (2688)..(2688): Absent or Thr
  misc_feature (2689)..(2689): Absent or Leu
  misc_feature (2690)..(2690): Absent or Asp
  misc_feature (2691)..(2691): Absent or Glu
  misc_feature (2692)..(2692): Absent or Ile
  misc_feature (2693)..(2693): Absent or Ser
  misc_feature (2694)..(2694): Absent or His
  misc_feature (2695)..(2695): Absent or Asp
  misc_feature (2696)..(2696): Absent or Leu
  misc_feature (2697)..(2697): Absent or Cys
  misc_feature (2698)..(2698): Absent or Pro
  misc_feature (2699)..(2699): Absent or Val
  misc_feature (2700)..(2700): Absent or Leu
  misc_feature (2701)..(2701): Absent or Ser
  misc_feature (2702)..(2702): Absent or Ile
  misc_feature (2703)..(2703): Absent or Gln
  misc_feature (2704)..(2704): Absent or Gln
  misc_feature (2705)..(2705): Absent or Leu
  misc_feature (2706)..(2706): Absent or Tyr
  misc_feature (2707)..(2707): Absent or Arg
  misc_feature (2708)..(2708): Absent or Ile
  misc_feature (2709)..(2709): Absent or Ser
  misc_feature (2710)..(2710): Absent or Thr
  misc_feature (2711)..(2711): Absent or Met
  misc_feature (2712)..(2712): Absent or Tyr
  misc_feature (2713)..(2713): Absent or Trp
  misc_feature (2714)..(2714): Absent or Asp
  misc_feature (2715)..(2715): Absent or Asp
  misc_feature (2716)..(2716): Absent or Lys
  misc_feature (2717)..(2717): Absent or Tyr
  misc_feature (2718)..(2718): Absent or Gly
  misc_feature (2719)..(2719): Absent or Thr
  misc_feature (2720)..(2720): Absent or His
  misc_feature (2721)..(2721): Absent or Ser
  misc_feature (2722)..(2722): Absent or Val
  misc_feature (2723)..(2723): Absent or Ser
  misc_feature (2724)..(2724): Absent or Pro
  misc_feature (2725)..(2725): Absent or Asp
  misc_feature (2726)..(2726): Absent or Val
  misc_feature (2727)..(2727): Absent or Ser
  misc_feature (2728)..(2728): Absent or Asp
  misc_feature (2729)..(2729): Absent or His
  misc_feature (2730)..(2730): Absent or Leu
  misc_feature (2731)..(2731): Absent or Lys
  misc_feature (2732)..(2732): Absent or Leu
  misc_feature (2733)..(2733): Absent or Leu
  misc_feature (2734)..(2734): Absent or Met
  misc_feature (2735)..(2735): Absent or Ile
  misc_feature (2736)..(2736): Absent or Cys
  misc_feature (2737)..(2737): Absent or Val
  misc_feature (2738)..(2738): Absent or Ile
  misc_feature (2739)..(2739): Absent or Ala
  misc_feature (2740)..(2740): Absent or Asn
  misc_feature (2741)..(2741): Absent or Met
  misc_feature (2742)..(2742): Absent or Arg
  misc_feature (2743)..(2743): Absent or Val
  misc_feature (2744)..(2744): Absent or Leu
  misc_feature (2745)..(2745): Absent or Met
  misc_feature (2746)..(2746): Absent or Thr
  misc_feature (2747)..(2747): Absent or Glu
  misc_feature (2748)..(2748): Absent or Asp
  misc_feature (2749)..(2749): Absent or Ser
  misc_feature (2750)..(2750): Absent or Asn
  misc_feature (2751)..(2751): Absent or Asn
  misc_feature (2752)..(2752): Absent or Ala
  misc_feature (2753)..(2753): Absent or Val
  misc_feature (2754)..(2754): Absent or Ser
  misc_feature (2755)..(2755): Absent or Asn
  misc_feature (2756)..(2756): Absent or Ser
  misc_feature (2757)..(2757): Absent or Phe
  misc_feature (2758)..(2758): Absent or Leu
  misc_feature (2759)..(2759): Absent or Leu
  misc_feature (2760)..(2760): Absent or Asp
  misc_feature (2761)..(2761): Absent or Asp
  misc_feature (2762)..(2762): Absent or Asp
  misc_feature (2763)..(2763): Absent or Ser
  misc_feature (2764)..(2764): Absent or Ser
  misc_feature (2765)..(2765): Absent or Ile
  misc_feature (2766)..(2766): Absent or Pro
  misc_feature (2767)..(2767): Absent or Phe
  misc_feature (2768)..(2768): Absent or Ser
  misc_feature (2769)..(2769): Absent or Val
  misc_feature (2770)..(2770): Absent or Asp
  misc_feature (2771)..(2771): Absent or Asp
  misc_feature (2772)..(2772): Absent or Leu
  misc_feature (2773)..(2773): Absent or Ser
  misc_feature (2774)..(2774): Absent or Lys
  misc_feature (2775)..(2775): Absent or Ser
  misc_feature (2776)..(2776): Absent or Met
  misc_feature (2777)..(2777): Absent or Glu
  misc_feature (2778)..(2778): Absent or Lys
  misc_feature (2779)..(2779): Absent or Phe
  misc_feature (2780)..(2780): Absent or Glu
  misc_feature (2781)..(2781): Absent or Ile
  misc_feature (2782)..(2782): Absent or Ala
  misc_feature (2783)..(2783): Absent or Asp
  misc_feature (2784)..(2784): Absent or Ile
  misc_feature (2785)..(2785): Absent or Glu
  misc_feature (2786)..(2786): Absent or Pro
  misc_feature (2787)..(2787): Absent or Pro
  misc_feature (2788)..(2788): Absent or Pro
  misc_feature (2789)..(2789): Absent or Leu
  misc_feature (2790)..(2790): Absent or Ile
  misc_feature (2791)..(2791): Absent or Arg
  misc_feature (2792)..(2792): Absent or Glu
  misc_feature (2793)..(2793): Absent or Asn
  misc_feature (2794)..(2794): Absent or Ser
  misc_feature (2795)..(2795): Absent or Gly
  misc_feature (2796)..(2796): Absent or Phe
  misc_feature (2797)..(2797): Absent or Ser
  misc_feature (2798)..(2798): Absent or Phe
  misc_feature (2799)..(2799): Absent or Leu
  misc_feature (2800)..(2800): Absent or Leu
  misc_feature (2801)..(2801): Absent or Pro
  misc_feature (2802)..(2802): Absent or Val
  misc_feature (2803)..(2803): Absent or Ser
  misc_feature (2804)..(2804): Absent or Glu
  unsure (1)..(2804): unsure at all Xaa locations
XXXXXXXXXXXXXXXXXXXXXXXXXXXXXXXXXXXXXXXXXXXXXXXXXXXXXXXXXXXXXXXXXXXXXXXXXXXXXXXXXXXXXXXXXXXXXXXXXXXXXXXXXXXXXXXXXXXXXXXXXXXXXXXXXXXXXXXXXXXXXXXXXXXXXXXXXXXXXXXXXXXXXXXXXXXXXXXXXEEEXQXQLAXAXSASXXXXXXXXXXXXXDXXXXQIRXAXLXSLXXXXXXXXXXXXXXXXXXXXXXXXXAXXLSXXXXXXXXXRXYXXYXXLDYXEKVXXXXDXFYDXXXXSXXXXXXXXXXXXQGXMPSLXXLXXXXXXGXXGFEXXVXXRXXDXXLXEXXXXAXCIXLXXXXXXXXXXXXXRXAELVXXXMGGXXXDXXXXXXXXWXXXXSXEXXXXLXTXXXPIGXXXIGXSRHRALLFKXLADXVXXPCXLVKGSXYTGXXDDAXXXXXXXXXXREXLVDLMXXPGXLIPXDXXXXXXXXXXXXXXXXXXXXXXXXXXXXXXXXXXXXXXXXXXXXXGXXXXXXXXXXXXXXXXXXXEXXXXXXXXXXXXXXXXXXXXXXXXXXXXXXXXXXXXXXXXXXXXXXXXXXXXXXXXXXXXXXXXXXXXXXXXXXXXXXXXXXXXXXXXXXLXPFXXXXXXXXXXXXXXXXXXXXXXXXXXXXXXXXXXRXXXXXXXKNXXXXNXXXXXKXXXXXEXXXXXXXXXXXXXXXXXXXXXXXXXXXXXXXXXXXXXXXXXXXXXXXXXXXXXXXXXXXXXXXXXXXXXXXXXXXXXXXXXXXXXXXXXXXXXXXXXXXXXXXXXXXXXXXXXXXXXXXXXXXXXXXXXXXXXXXXXXXXXDXXXXXXDXXXXXXXXXXXXXXXXXXXXXXXXXXXXXXXXXXXXXXVXEXEIXWXDLXIXEXXXRIGXXXXXXXXXXXXXXXXXLGSYGEVYXADWXGTEVAVKKFLDQXFXGXALXEFXXXXXXXEVXXXXXXXXXXXRIMRRLRHPNXVXFXGAVTRPPXLSIXXEXLPRGSLYXIXHRPXXXXXXXXIDEXRRIXMALDVAXGMNCLHXSXPTIVHRDLKXPNLLVDXNWXVKVXDFGLSRLKHXTFLSSKSTAGTPEWMAPEVLRNEXSNEKCDVYSFGVILWELATLXXPWXGMNPMQVVGAVGFQXXRLXIPXXXDPXVXXIIXXCWQXDPNXRPSFXXLXXXLXXXXRLXXPXXXXXXXXXXXXXXXXXXXXXXXXXXXXXXXXXXXXXXXXXXXXXXXXXXXXXXXXXXXXXXXXXXXXXXXXXXXXXXXXXXXXXXXXXXXXXXXXXXXXXXXXXXXXXXXXXXXXXXXXXXXXXXXXXXXXXXXXXXXXXXXXXXXXXXXXXXXXXXXXXXXXXXXXXXXXXXXXXXXXXXXXXXXXXXXXXXXXXXXXXXXXXXXXXXXXXXXXXXXXXXXXXXXXXXXXXXXXXXXXXXXXXXXXXXXXXXXXXXXXXXXXXXXXXXXXXXXXXXXXXXXXXXXXXXXXXXXXXXXXXXXXXXXXXXXXXXXXXXXXXXXXXXXXXXXXXXXXXXXXXXXXXXXXXXXXXXXXXXXXXXXXXXXXXXXXXXXXXXXXXXXXXXXXXXXXXXXXXXXXXXXXXXXXXXXXXXXXXXXXXXXXXXXXXXXXXXXXXXXXXXXXXXXXXXXXXXXXXXXXXXXXXXXXXXXXXXXXXXXXXXXXXXXXXXXXXXXXXXXXXXXXXXXXXXXXXXXXXXXXXXXXXXXXXXXXXXXXXXXXXXXXXXXXXXXXXXXXXXXXXXXXXXXXXXXXXXXXXXXXXXXXXXXXXXXXXXXXXXXXXXXXXXXXXXXXXXXXXXXXXXXXXXXXXXXXXXXXXXXXXXXXXXXXXXXXXXXXXXXXXXXXXXXXXXXXXXXXXXXXXXXXXXXXXXXXXXXXXXXXXXXXXXXXXXXXXXXXXXXXXXXXXXXXXXXXXXXXXXXXXXXXXXXXXXXXXXXXXXXXXXXXXXXXXXXXXXXXXXXXXXXXXXXXXXXXXXXXXXXXXXXXXXXXXXXXXXXXXXXXXXXXXXXXXXXXXXXXXXXXXXXXXXXXXXXXXXXXXXXXXXXXXXXXXXXXXXXXXXXXXXXXXXXXXXXXXXXXXXXXXXXXXXXXXXXXXXXXXXXXXXXXXXXXXXXXXXXXXXXXXXXXXXXXXXXXXXXXXXXXXXXXXXXXXXXXXXXXXXXXXXXXXXXXXXXXXXXXXXXXXXXXXXXXXXXXXXXXXXXXXXXXXXXXXXXXXXXXXXXXXXXXXXXXXXXXXXXXXXXXXXXXXXXXXXXXXXXXXXXXXXXXXXXXXXXXXXXXXXXXXXXXXXXXXXXXXXXXXXXXXXXXXXXXXXXXXXXXXXXXXXXXXXXXXXXXXXXXXXXXXXXXXXXXXXXXXXXXXXXXXXXXXXXXXXXXXXXXXXXXXXXXXXXXXXXXXXXXXXXXXXXXXXXXXXXXXXXXXXXXXXXXXXXXXXXXXXXXXXXXXXXXXXXXXXXXXXXXXXXXXXXXXXXXXXXXXXXXXXXXXXXXXXXXXXXXXXXXXXXXXXXXXXXXXXXXXXXXXXXXXXXXXXXXXXXXXXXXXXXXXXXXXXXXXXXXXXXXXXXXXXXXXXXXXXXXXXXXXXXXXXXXXXXXXXXXXXXXXXXXXXXXXXXXXXXXXXXXXXXXXXXXXXXXXXXXXXXXXXXXXXXXXXXXXXXXXXXXXXXXXXXXXXXXXXXXXXXXXXXXXXXXXXXXXXXXXXXXXXXXXXXXXXXXXXXXXXXXXXXXXXXXXXXXXXXXXXXXXXXXXXXXXXXXXXXXXXXXXXXXXXXXXXXXXXXXXXXXXXXXXXXXXXXXXXX

SEQ ID NO: 36463 - protein, 1010 aa, Artificial sequence
  consensus sequence of seq id no: 461  and its homologs
  misc_feature (1)..(1): Absent or Met
  misc_feature (2)..(2): Absent or Ser or Arg
  misc_feature (3)..(3): Absent or Arg or His
  misc_feature (4)..(4): Absent or Pro or Asp
  misc_feature (5)..(5): Absent or Ala or Asp
  misc_feature (6)..(6): Absent or Val or Tyr
  misc_feature (7)..(7): Absent or Asp or Thr
  misc_feature (8)..(8): Absent or Val or Leu
  misc_feature (9)..(9): Absent or Val
  misc_feature (10)..(10): Absent or Val or Ile
  misc_feature (11)..(11): Absent or Pro
  misc_feature (12)..(12): Absent or Thr
  misc_feature (13)..(13): Absent or Ala or Val
  misc_feature (14)..(14): Absent or Gly
  misc_feature (15)..(15): Absent or Arg
  misc_feature (16)..(16): Absent or Pro or Glu
  misc_feature (17)..(17): Absent or Met or Ser
  misc_feature (18)..(18): Absent or Glu or Leu
  misc_feature (19)..(19): Absent or Asn or Arg
  misc_feature (20)..(20): Absent or Ile or Ala or Arg
  misc_feature (21)..(21): Absent or Leu
  misc_feature (22)..(22): Absent or Ile or Leu
  misc_feature (23)..(23): Absent or Arg or Glu or Ile
  misc_feature (24)..(24): Absent or Gly or Ala
  misc_feature (25)..(25): Absent or Val or Leu
  misc_feature (26)..(26): Absent or Asn or Ala or Arg
  misc_feature (27)..(27): Absent or Trp or Arg or Glu
  misc_feature (28)..(28): Absent or Leu or Ser
  misc_feature (29)..(29): Absent or Gly or Met
  misc_feature (30)..(30): Absent or Asp or Gln or Gly
  misc_feature (31)..(31): Absent or Ala or Pro
  misc_feature (32)..(32): Absent or Val or Pro or Gln
  misc_feature (33)..(33): Absent or Met or Pro
  misc_feature (34)..(34): Absent or Ser or Gly or Pro
  misc_feature (35)..(35): Absent or Leu or Arg or Glu
  misc_feature (36)..(36): Absent or Pro or Leu or Val
  misc_feature (37)..(37): Absent or Ala or Leu or Val
  misc_feature (38)..(38): Absent or Val or Leu
  misc_feature (39)..(39): Absent or Arg or Val
  misc_feature (40)..(40): Absent or Ala or Asp
  misc_feature (41)..(41): Absent or Ile or Asp
  misc_feature (42)..(42): Absent or Arg
  misc_feature (43)..(43): Absent or Lys or Arg or Pro
  misc_feature (44)..(44): Absent or Leu or Asn or Arg
  misc_feature (45)..(45): Absent or His or Pro
  misc_feature (46)..(46): Absent or Pro or Gly
  misc_feature (47)..(47): Absent or Thr or Gly or Asp
  misc_feature (48)..(48): Absent or Ser or Pro or Gly
  misc_feature (49)..(49): Absent or Asn or Leu
  misc_feature (50)..(50): Absent or Ile or Leu or Pro
  misc_feature (51)..(51): Absent or Ser or Pro or Leu
  misc_feature (52)..(52): Absent or Ile or Glu or Pro
  misc_feature (53)..(53): Absent or Leu or Gly or Asp
  misc_feature (54)..(54): Absent or Ile or Pro or Asp
  misc_feature (55)..(55): Absent or Lys or Pro
  misc_feature (56)..(56): Absent or Glu or Ala or Pro
  misc_feature (57)..(57): Absent or Lys or Gly
  misc_feature (58)..(58): Absent or Ile or Leu
  misc_feature (59)..(59): Absent or Ala
  misc_feature (60)..(60): Absent or Asp or Gly
  misc_feature (61)..(61): Absent or Leu or Arg
  misc_feature (62)..(62): Absent or Phe or Val
  misc_feature (63)..(63): Absent or Arg or Glu
  misc_feature (64)..(64): Absent or Trp or Val
  misc_feature (65)..(65): Absent or Glu or Leu
  misc_feature (66)..(66): Absent or Asn or Arg
  misc_feature (67)..(67): Absent or Thr or Gly or Ser
  misc_feature (68)..(68): Absent or Ile or Pro or Gly
  misc_feature (69)..(69): Absent or Asp or Ala or Gly
  misc_feature (70)..(70): Absent or Glu or Arg
  misc_feature (71)..(71): Absent or Val or Gly
  misc_feature (72)..(72): Absent or Ile or Pro
  misc_feature (73)..(73): Absent or Ile or Ala
  misc_feature (74)..(74): Absent or Tyr or Ala
  misc_feature (75)..(75): Absent or Ser or Ala
  misc_feature (76)..(76): Absent or Glu or Arg
  misc_feature (77)..(77): Absent or Gly or Asn
  misc_feature (78)..(78): Absent or Phe or Ala or Val
  misc_feature (79)..(79): Absent or Thr or Gly
  misc_feature (80)..(80): Absent or Gly or Trp
  misc_feature (81)..(81): Absent or Lys or Arg
  misc_feature (82)..(82): Absent or Ile or Ala
  misc_feature (83)..(83): Absent or Lys or Ser
  misc_feature (84)..(84): Absent or Thr or Gly or Arg
  misc_feature (85)..(85): Absent or Ile or Ala or Ser
  misc_feature (86)..(86): Absent or Lys or Gly or Arg
  misc_feature (87)..(87): Absent or Glu or Trp
  misc_feature (88)..(88): Absent or Leu or Val
  misc_feature (89)..(89): Absent or Lys or Ala or Cys
  misc_feature (90)..(90): Absent or Asn or Met or Phe
  misc_feature (91)..(91): Absent or Lys or Leu
  misc_feature (92)..(92): Absent or Lys or Val or Asp
  misc_feature (93)..(93): Absent or Phe or Val or Asp
  misc_feature (94)..(94): Absent or Lys or Ile or Asp
  misc_feature (95)..(95): Absent or Arg or Leu or Val
  misc_feature (96)..(96): Absent or Ala or Val or Leu
  misc_feature (97)..(97): Absent or Tyr or Gly or Pro
  misc_feature (98)..(98): Absent or Leu or Gly or Glu or Asp
  misc_feature (99)..(99): Absent or Leu or Lys or Pro or Arg
  misc_feature (100)..(100): Absent or Gln or Gly or Asp
  misc_feature (101)..(101): Absent or Met or Asn or Thr or Trp
  misc_feature (102)..(102): Absent or Ser or Ala or Arg or Thr or Ile or Leu
  misc_feature (103)..(103): Absent or Leu or Met or Arg or Ser or Pro
  misc_feature (104)..(104): Absent or Ser or Asp or Gly or Ala or Glu
  misc_feature (105)..(105): Absent or Cys or Ala or Ser or Leu or Glu
  misc_feature (106)..(106): Absent or Gln or Ala or Leu or Cys or His
  misc_feature (107)..(107): Absent or Pro or Leu or Ser or Arg
  misc_feature (108)..(108): Absent or Glu or Ile or Gln or Asp or Met
  misc_feature (109)..(109): Absent or Glu or Thr or Asn or Leu
  misc_feature (110)..(110): Absent or Gln or Thr or Ile or Ser or Lys or Arg
  misc_feature (111)..(111): Absent or Ile or Val or Pro or Gly or Ala or Gln
  misc_feature (112)..(112): Absent or Arg or Ala or Lys or Leu
  misc_feature (113)..(113): Absent or Leu or Gly or Pro or Asp or Val
  misc_feature (114)..(114): Absent or Thr or Ile or Met or Pro or Ala
  misc_feature (115)..(115): Absent or Val or Pro or Ile or Arg or Cys or Leu
  misc_feature (116)..(116): Absent or Thr or Glu or Asn or Val or Gly
  misc_feature (117)..(117): Absent or Asp or Arg or Ile or Ala or Gly
  misc_feature (118)..(118): Absent or Ser or Val or Ala or Gly
  misc_feature (119)..(119): Absent or Gln or Gly or Asn or Ser or Leu
  misc_feature (120)..(120): Absent or Tyr or Trp or Lys or Gln or Gly
  misc_feature (121)..(121): Absent or Arg or Asn or Pro or Gly or Ser or Thr
  misc_feature (122)..(122): Absent or Gln or Arg or Ile
  misc_feature (123)..(123): Absent or Lys or Asp or Leu or Ala
  misc_feature (124)..(124): Absent or Val or Cys or Gln or Arg or Gly
  misc_feature (125)..(125): Absent or Cys or Arg or Tyr or Val or Leu or Glu
  misc_feature (126)..(126): Absent or Thr or Arg or Gln or Pro or Glu
  misc_feature (127)..(127): Absent or Ala or Ile or Leu or Val or Thr
  misc_feature (128)..(128): Absent or Met or Arg or Phe or Glu or Pro or Lys
  misc_feature (129)..(129): Absent or Glu or Thr or Leu or Ile or Ala
  misc_feature (130)..(130): Absent or Glu or Ala or Thr or Gly or Pro or Arg
  misc_feature (131)..(131): Absent or Arg or Glu or His or Lys or Pro
  misc_feature (132)..(132): Absent or Ile or Glu or Pro or Arg or Lys
  misc_feature (133)..(133): Absent or Met or Lys or Ile or Val or Phe or Pro
  misc_feature (134)..(134): Absent or Ile or Val or Phe or Pro or Asn or Thr or Ser or Met
  misc_feature (135)..(135): Absent or Pro or Arg or Val or Tyr or Leu or Asp
  misc_feature (136)..(136): Absent or Phe or Leu or Glu or His or Thr or Ala or Asp
  misc_feature (137)..(137): Absent or His or Lys or Thr or Gly or Asp or Glu or Gln or Ile
  misc_feature (138)..(138): Absent or Asp or Lys or Ile or Glu or Arg or Gly
  misc_feature (139)..(139): Absent or Arg or His or Ala or Asp or Ile or Gly
  misc_feature (140)..(140): Absent or Pro or Asn or Val or Arg or Leu or Thr
  misc_feature (141)..(141): Absent or Phe or Lys or Leu or Ala or Pro
  misc_feature (142)..(142): Absent or Ala or Thr or Ile or Gly or Arg or Phe
  misc_feature (143)..(143): Absent or Glu or Leu or Arg or His or Gly
  misc_feature (144)..(144): Absent or Tyr or Lys or Ile or His or Glu or Ala or Asp
  misc_feature (145)..(145): Absent or Leu or Ile or Lys or Thr
  misc_feature (146)..(146): Absent or Val or Asn or Asp or Gly or Ala or Leu
  misc_feature (147)..(147): Absent or Glu or Asp or Tyr or Arg or Gln or Ile
  misc_feature (148)..(148): Absent or Met or Glu or Arg or Phe or Val or Trp or Asp
  misc_feature (149)..(149): Absent or Leu or Tyr or Val or Phe or Ile or Glu
  misc_feature (150)..(150): Absent or Arg or Leu or Glu or Thr
  misc_feature (151)..(151): Absent or Gly or Leu or Ile or Asp or Ala
  misc_feature (152)..(152): Absent or Gln or Pro or Glu or Tyr or Asn or Asp or Arg
  misc_feature (153)..(153): Absent or Gly or Asp or Ala or Lys or Phe or Ile or Met or Tyr
  misc_feature (154)..(154): Absent or Phe or Ile or Ala or Arg or Gly or Gln
  misc_feature (155)..(155): Absent or Arg or Lys or Phe or Asn or Tyr or Ile
  misc_feature (156)..(156): Absent or Arg or Lys or Ala or Asn or Gly or Phe
  misc_feature (157)..(157): Absent or Ile or Ala or Pro or Glu or Arg or Asp
  misc_feature (158)..(158): Absent or Leu or Ala or Gly or Ser or Asn or Glu or Asp
  misc_feature (159)..(159): Absent or Phe or Lys or Asp or Leu or Trp or Val or Ile
  misc_feature (160)..(160): Absent or Leu or Met or Arg or Gly
  misc_feature (161)..(161): Absent or Leu or Ile or Pro or Val or Glu
  misc_feature (162)..(162): Absent or Gly or Val or Ile or Asp or Asn or Arg or Ala or Leu
  misc_feature (163)..(163): Absent or Tyr or Glu or Ala or Ile or Leu
  misc_feature (164)..(164): Absent or Leu or Lys or Gly or Pro or Ser
  misc_feature (165)..(165): Absent or Pro or Tyr or Trp or Cys or Gly or His
  misc_feature (166)..(166): Absent or Asp or Lys or Arg or Ile or Tyr or Phe
  misc_feature (167)..(167): Absent or Lys or Ala or Asn or Arg or Asp
  misc_feature (168)..(168): Absent or Val or Gly or Pro or Glu
  misc_feature (169)..(169): Absent or Thr or Lys or Ala or Ser or Arg or Ile
  misc_feature (170)..(170): Absent or Glu or Lys or Arg or Leu or Ile or Phe or Val
  misc_feature (171)..(171): Absent or His or Val or Lys or Pro or Glu
  misc_feature (172)..(172): Absent or Phe or Leu or Glu or Arg or Thr
  misc_feature (173)..(173): Absent or Gly or Ile or Met or Arg or Ala or His
  misc_feature (174)..(174): Absent or Asp or Phe or Cys or Leu or Thr or Tyr
  misc_feature (175)..(175): Absent or Gly or Ser or Ala or Arg
  misc_feature (176)..(176): Absent or Ser or Asn or Ala or Gly or Glu
  misc_feature (177)..(177): Absent or Arg or Gly or Ala or Asp
  misc_feature (178)..(178): Absent or Phe or Gly or Lys or Val or Ser or Thr
  misc_feature (179)..(179): Absent or Gly or Ser or Glu or Lys or Asp or Arg
  misc_feature (180)..(180): Absent or Val or Ala or Leu or Glu or Gly
  misc_feature (181)..(181): Absent or Glu or Ala or Lys or Val or Gly or Arg
  misc_feature (182)..(182): Absent or Ile or Asp or Asn or Glu or Leu or Ala
  misc_feature (183)..(183): Absent or Glu or Ala or Leu or Asp or Arg or Lys
  misc_feature (184)..(184): Absent or Tyr or Gln or Lys or Ala or Ile
  misc_feature (185)..(185): Absent or Ala or His or Arg or Leu or Val
  misc_feature (186)..(186): Absent or Val or Ile or Phe or Pro or His or Arg or Ser
  misc_feature (187)..(187): Absent or Ser or Val or Ala or Ile or Asp
  misc_feature (188)..(188): Absent or Pro or Ala or Leu or Asp or Gly or Arg
  misc_feature (189)..(189): Absent or Val or Glu or Ala or Phe or Leu or Gly
  misc_feature (190)..(190): Absent or Glu or Leu or Arg or Thr
  misc_feature (191)..(191): Absent or Asp or Val or Thr or Ser or Ile or Glu
  misc_feature (192)..(192): Absent or Glu or Gly or Pro or Phe or Val or Leu
  misc_feature (193)..(193): Absent or Thr or Arg or His or Gly or Tyr or Leu
  misc_feature (194)..(194): Absent or Gly or Phe or Leu or Ala
  misc_feature (195)..(195): Absent or Thr or Leu or Ile or Lys or Asp or Glu
  misc_feature (196)..(196): Absent or Arg or Lys or Phe or Tyr or Val or Gly
  misc_feature (197)..(197): Absent or Leu or Glu or Asp or Gly or Ile or Thr or Arg
  misc_feature (198)..(198): Absent or Arg or Asp or Met or Val or Cys or Ala
  misc_feature (199)..(199): Absent or Arg or Lys or Pro or Thr or Asp or Leu
  misc_feature (200)..(200): Absent or Val or Gly or Pro or Lys or Ile or His
  misc_feature (201)..(201): Absent or Lys or Ile or Leu or Asp or Pro or His
  misc_feature (202)..(202): Absent or Asp or Pro or Gly or Trp or Leu or Ala or Val
  misc_feature (203)..(203): Absent or Arg or Ala or Glu or Lys
  misc_feature (204)..(204): Absent or Leu or Ile or Glu or Ala or Ser or Pro
  misc_feature (205)..(205): Absent or Asp or Ala or Glu or Val or Leu
  misc_feature (206)..(206): Absent or Asp or Leu or Lys or Ile or Gly or Thr
  misc_feature (207)..(207): Absent or Ile or Thr or His or Phe or Arg or Pro or Trp or Asp
  misc_feature (208)..(208): Absent or Phe or Thr or Ala or Ile or Tyr or Leu or Arg or Gln
  misc_feature (209)..(209): Absent or Val or Asn or Glu or His or Ser
  misc_feature (210)..(210): Absent or Leu or Ser or Val or Met or Phe
  misc_feature (211)..(211): Absent or Leu or Ser or Lys or Val
  misc_feature (212)..(212): Absent or Tyr or Asn or His or Lys or Arg or Leu
  misc_feature (213)..(213): Absent or Cys or Leu or Lys or Arg or Ala
  misc_feature (214)..(214): Absent or Asp or Thr or Phe or Pro or Gln or Asn
  misc_feature (215)..(215): Absent or Asn or Ser or Ala or Ile or Gly
  misc_feature (216)..(216): Absent or Tyr or Ile or Val or Gly or Ala or Asp
  misc_feature (217)..(217): Absent or Trp or Ser or Ala or Glu or Thr or Asn
  misc_feature (218)..(218): Absent or Pro or Asn or Tyr or Leu or Ala or Arg
  misc_feature (219)..(219): Absent or Met or Asp or Gly or Val or Phe
  misc_feature (220)..(220): Absent or Pro or Tyr or Ser or Val or Asp or Asn
  misc_feature (221)..(221): Absent or Phe or Gly or Asp or Val or His or Ala
  misc_feature (222)..(222): Absent or Ala or Phe or Tyr or Val or Pro or Leu or Asn
  misc_feature (223)..(223): Absent or Ala or Asp or Leu or Asn or Met
  misc_feature (224)..(224): Absent or Met or Glu or Thr or Phe or Asp or Leu or Arg
  misc_feature (225)..(225): Absent or Trp or Val or Gly or His or Met or Leu or Arg or Asp
  misc_feature (226)..(226): Absent or Glu or Phe or Ser or Pro or Arg or Leu or Lys
  misc_feature (227)..(227): Absent or Arg or Glu or Ala or Gln or Tyr or His or Ile
  misc_feature (228)..(228): Absent or Tyr or Arg or Gly or Asp or His or Ala
  misc_feature (229)..(229): Absent or Cys or Gln or Ala or Glu or Ser or Pro or Arg
  misc_feature (230)..(230): Absent or Arg or Val or Leu or Asp or Ala
  misc_feature (231)..(231): Absent or Leu or Glu or Thr or Trp or Gln
  misc_feature (232)..(232): Absent or Gly or Ala or Glu or Ile or Arg
  misc_feature (233)..(233): Absent or Val or Leu or Ser or Ile or Glu or Thr or Arg or Gly
  misc_feature (234)..(234): Absent or Glu or Leu or Ala or Lys or Val or Ser or Arg
  misc_feature (235)..(235): Absent or Ala or Glu or Arg or Asp or Asn or Ile or Val
  misc_feature (236)..(236): Absent or Met or Glu or Pro or Ser or Asn or Gly or His
  misc_feature (237)..(237): Absent or Val or Glu or Gly or Thr or Met
  misc_feature (238)..(238): Absent or Thr or Asp or Ile or Gly or Ser or Pro or Ala
  misc_feature (239)..(239): Absent or Val or Thr or Tyr or Lys or Ser or Pro or Leu
  misc_feature (240)..(240): Absent or Tyr or Val or Leu or Asn or Gly or Arg
  misc_feature (241)..(241): Absent or Arg or Ile or Phe or Thr or Asp
  misc_feature (242)..(242): Absent or Asn or Gly or Ala or Ile or Thr or Ser or Arg or Met
  misc_feature (243)..(243): Absent or Arg or Ile or Gly or Phe or Ala or Pro or Val
  misc_feature (244)..(244): Absent or Asp or Ser or Lys or His or Gly or Arg or Ala or Val
  misc_feature (245)..(245): Absent or Gly or Thr or Ser or His
  misc_feature (246)..(246): Absent or Tyr or Ser or Lys or Leu or Ala or Asp
  misc_feature (247)..(247): Absent or Thr or Gly or Leu or Pro or Ser or Ala or Arg
  misc_feature (248)..(248): Absent or Arg or Asn or His or Gly or Val or Thr or Tyr
  misc_feature (249)..(249): Absent or Asp or Ser or Glu or Lys or Met or Thr or Gly
  misc_feature (250)..(250): Absent or Asn or Pro or Met or Leu or Gln or Ala or Ser or Arg
  misc_feature (251)..(251): Absent or Leu or Asn or Ser or Ile or Asp or Arg or Ala or Val
  misc_feature (252)..(252): Absent or Arg or Val or Cys or Ile or Gly
  misc_feature (253)..(253): Absent or Val or Leu or Phe or Ala or Gly or Thr
  misc_feature (254)..(254): Absent or Asp or Lys or Arg or Leu or Ile or Val or Ala
  misc_feature (255)..(255): Absent or Asp or Ala or Arg or Gly or Pro
  misc_feature (256)..(256): Absent or Asp or Leu or Ala or Glu or Asn or Tyr
  misc_feature (257)..(257): Absent or Gly or Lys or Cys or Leu or Val or Ala or Ile
  misc_feature (258)..(258): Absent or Leu or Lys or Thr or Asp or Val or Ser or Ala
  misc_feature (259)..(259): Absent or Leu or Ala or Ile or Asn or Val or Gly or Arg
  misc_feature (260)..(260): Absent or Ala or Lys or Arg or Leu or Pro or Asp
  misc_feature (261)..(261): Absent or Leu or Glu or Ala or Trp or Phe or Met
  misc_feature (262)..(262): Absent or Tyr or Leu or Cys or Gly or Ile or Val
  misc_feature (263)..(263): Absent or Asp or Lys or Gly or Asn or Tyr or Trp or Arg or Ala
  misc_feature (264)..(264): Absent or Lys or Gly or Val or Asp or Ile or Arg or Pro
  misc_feature (265)..(265): Absent or Ser or Thr or Leu or Arg or Ala or Gly
  misc_feature (266)..(266): Absent or Arg or Thr or Val or Gly or Ser or Pro or Asp or Ala
  misc_feature (267)..(267): Absent or Thr or Ile or Val or Pro or Ala or Gly or Asp
  misc_feature (268)..(268): Absent or Ala or Met or Arg or Ser
  misc_feature (269)..(269): Absent or Pro or Leu or Met or His or Ile or Arg or Thr
  misc_feature (270)..(270): Absent or Gly or Ser or Thr or Leu or Met or Ala
  misc_feature (271)..(271): Absent or Leu or Gly or Asn or Ala or Pro
  misc_feature (272)..(272): Absent or Ala or Lys or Glu or Tyr or Phe or Leu or Val
  misc_feature (273)..(273): Absent or Gly or Asn or Ser or Ala or Leu
  misc_feature (274)..(274): Absent or Val or Gly or Leu or Pro or Trp or Ala
  misc_feature (275)..(275): Absent or Asp or Gly or Lys or Leu
  misc_feature (276)..(276): Absent or Ile or Glu or Gln or Val or Gly or Leu
  misc_feature (277)..(277): Absent or Gly or Met or Leu or Pro or Thr or Cys or Tyr
  misc_feature (278)..(278): Absent or Phe or Ile or Ala or Leu or Tyr or Thr or Val
  misc_feature (279)..(279): Absent or Phe or Lys or Glu or Val or Ser or Thr or Ile
  misc_feature (280)..(280): Absent or Ile or Tyr or Phe or Ala or Asp or Glu
  misc_feature (281)..(281): Absent or Leu or Ala or Ile or Phe or Lys
  misc_feature (282)..(282): Absent or Thr or Asp or Phe or Gly or Ala or Ser
  misc_feature (283)..(283): Absent or Arg or Ile or Phe or Gly or Lys or Ala
  misc_feature (284)..(284): Absent or Ala or Ser or Leu or Asp or Arg or Ile
  misc_feature (285)..(285): Absent or Val or Ile or Thr or Arg or Ala
  misc_feature (286)..(286): Absent or Ile or Val or Asn or Ser or Phe or Trp or Glu
  misc_feature (287)..(287): Absent or Asp or Val or Pro or Leu or Ile
  misc_feature (288)..(288): Absent or Leu or Pro or Glu or Lys or Ser or Ala
  misc_feature (289)..(289): Absent or Ile or Phe or Ser or Leu or Gly or Lys
  misc_feature (290)..(290): Absent or Pro or His or Arg or Thr or Val or Leu
  misc_feature (291)..(291): Absent or Glu or Met or Asp or Gly or Asn or Arg or Pro
  misc_feature (292)..(292): Absent or Gly or Thr or Pro or Asp or Asn or Ala
  misc_feature (293)..(293): Absent or Gly or Pro or Leu or Val or Ser or Met
  misc_feature (294)..(294): Absent or Asn or Arg or Lys or Glu or Pro or Leu or Ile
  misc_feature (295)..(295): Absent or Pro or Ile or Phe or Glu
  misc_feature (296)..(296): Absent or Ser or Gln or Ala or Ile or Val
  misc_feature (297)..(297): Absent or Phe or Glu or Gly or Tyr or Ser or Leu or Asp
  misc_feature (298)..(298): Absent or Glu or Ser or Lys or Ala or Gly or Val or Arg
  misc_feature (299)..(299): Absent or Lys or His or Val or Tyr or Leu or Phe or Gly
  misc_feature (300)..(300): Absent or Ser or Ile or Asn or Leu or Pro or Cys
  misc_feature (301)..(301): Absent or Val or Arg or Thr or Leu or Ala or Gly or Phe
  misc_feature (302)..(302): Absent or Tyr or Leu or Ala or Pro or Ser or Thr or Asp
  misc_feature (303)..(303): Absent or Pro or Phe or Gln or Met or Glu or Ser or Val or Asp
  misc_feature (304)..(304): Absent or Val or Met or Arg or Tyr or Ala
  misc_feature (305)..(305): Absent or Leu or Arg or Asn or Glu or Thr or Ile or Ser or Pro
  misc_feature (306)..(306): Absent or Val or Ser or Pro or Cys or Thr or Lys or Ile or Met or Gly or His
  misc_feature (307)..(307): Absent or Glu or Pro or Phe or Ser or Arg or Asp or Gly
  misc_feature (308)..(308): Absent or Arg or Asn or Pro or Thr or Ile or Asp or Leu
  misc_feature (309)..(309): Absent or Arg or Met or Ala or Cys or Phe or Gly or Val or Glu
  misc_feature (310)..(310): Absent or Met or Gln or Ser or Ile or Phe or Ala or Thr or X or Gly
  misc_feature (311)..(311): Absent or Ser or Asn or Leu or Lys or Arg or Val or Ala or Thr
  misc_feature (312)..(312): Absent or Asn or Lys or Ala or Thr or Val or Ile or Glu or Asp or Met
  misc_feature (313)..(313): Absent or Asn or Ala or Arg or Val or Cys or His or Lys or Ser or Tyr or Gly
  misc_feature (314)..(314): Absent or Asn or Phe or His or Asp or Cys or Met or Leu or Arg or Thr or Ala or Ser
  misc_feature (315)..(315): Absent or His or Glu or Ile or Ser or Gly or Pro or Ala or Leu or Trp or Met
  misc_feature (316)..(316): Absent or Gly or Thr or Gln or Arg or His or Met or Asp or Cys or Glu or Leu or Ala or Tyr or Asn
  misc_feature (317)..(317): Absent or Leu or Asp or Glu or Gln or Ile or Trp or Val or Gly or Met or Pro or Phe or Arg or Lys or His
  misc_feature (318)..(318): Absent or Ala or Pro or His or Lys or Ser or Glu or Leu or Asp or Cys or Ile or Met or Tyr
  misc_feature (319)..(319): Absent or Ile or Val or Arg or His or Asn or Tyr or Ala or Cys or Leu or Thr or Met or Trp or Pro or Asp or Phe
  misc_feature (320)..(320): Absent or Met or Phe or Tyr or Ile or Arg or Pro or Ala or Cys or Asp or Val or Thr or Leu or His
  misc_feature (321)..(321): Absent or Val or Thr or Tyr or Lys or Ser or Ile or Met or Ala or Pro or Asp or Leu or Phe or Arg or Gly or His
  misc_feature (322)..(322): Absent or Asn or Pro or Ser or Ile or Ala or Gln or Val or Met or Arg or His or Asp or Glu or Thr or Phe or Leu
  misc_feature (323)..(323): Absent or Ala or Asn or Val or Gly or Asp or Pro or Phe or Arg or Ile or Cys or Ser or Thr or Met or Leu or Tyr
  misc_feature (324)..(324): Absent or Gln or Gly or His or Pro or Val or Ala or Glu or Ser or Leu or Asp or Lys or Phe
  misc_feature (325)..(325): Met or Absent or Ser or Ile or Tyr or Phe or Val or Lys or Ala or Asn or Thr or Gly or Arg or Asp or Leu
  misc_feature (326)..(326): Glu or Absent or Met or Lys or His or Leu or Ala or Gly or Pro or Thr or Ile or Ser or Arg or Asn or Asp or Trp or Phe or Tyr or Val
  misc_feature (327)..(327): Thr or Absent or Gly or Lys or Glu or Cys or Ala or Val or Ile or Asn or Leu or Asp or Tyr or Ser or Met or Arg or Phe or Pro
  misc_feature (328)..(328): Val or Absent or Met or Ser or Leu or Arg or Asp or Ile or Thr or Pro or Cys or Gly or Glu or Gln or Asn or Tyr or Trp
  misc_feature (329)..(329): Arg or Absent or Lys or Ser or Leu or Gly or Phe or Asp or Gln or Met or Trp or Ile or Ala or Thr or Asn
  misc_feature (330)..(330): Ile or Absent or His or Asn or Pro or Arg or Lys or Ser or Thr or Leu or Ala or Phe or Asp or Tyr or Val or Met
  misc_feature (331)..(331): Ile or Absent or His or Leu or Met or Glu or Ala or Val or Thr or Tyr or Pro or Lys or Gly or Asp or Arg or Ser or Phe
  misc_feature (332)..(332): Tyr or Absent or His or Lys or Thr or Val or Gly or Asp or Glu or Met or Gln or Ala or Leu or Ser or Arg or Pro or Cys or Ile or Asn
  misc_feature (333)..(333): Val or Absent or Lys or His or Gly or Glu or Ile or Met or Gln or Arg or Asn or Ala or Thr or Cys or Pro or Trp or Ser or Asp or Leu
  misc_feature (334)..(334): Arg or Absent or Thr or His or Ile or Ala or Ser or Gly or Met or Leu or Glu or Pro or Asp or Lys or Val or Gln or Tyr or Asn
  misc_feature (335)..(335): Asp or Absent or His or Thr or Met or Phe or Ser or Gln or Arg or Tyr or Ile or Glu or Ala or Lys or Gly
  misc_feature (336)..(336): Asn or Absent or Lys or Met or Gly or Ala or Leu or Arg or Pro or Ile or Phe or Thr or Ser or Val or Asp or Gln or Glu or His
  misc_feature (337)..(337): Gln or Absent or Glu or Met or Thr or Ser or Lys or Val or Arg or Ala or Pro or Asn or Gly or Ile or Leu or Asp
  misc_feature (338)..(338): Thr or Absent or Glu or Lys or Met or Ser or Asn or Gln or Gly or Ala or Pro or Arg or Leu or His or Val or Asp
  misc_feature (339)..(339): Leu or Met or Lys or Phe or Asn or Ala or Glu or Gln or Asp or Pro or Absent or Arg or Ser or Val or Ile or Thr or Cys or His
  misc_feature (340)..(340): Lys or Pro or Absent or Ser or Arg or Gln or Thr or Met or Trp or Asp or Ile or Asn or His or Ala or Gly or Glu or Cys or Leu
  misc_feature (341)..(341): Thr or Ile or Tyr or Leu or Phe or Trp or Ala or Cys or Val or Absent or Asn
  misc_feature (342)..(342): Val or Leu or Phe or Ile or Absent or Ala or Met
  misc_feature (343)..(343): Phe or Leu or Absent or Cys or Val or Ile
  misc_feature (344)..(344): Val or Ile or Leu or Phe or Absent or Cys
  misc_feature (349)..(349): Thr or Val or Cys or Absent or Ile
  misc_feature (350)..(350): Ile or Leu or Val or Absent or Met
  misc_feature (351)..(351): Asn or Val or Ile or Thr or Absent or Leu
  misc_feature (352)..(352): Arg or Lys or Ile or Glu or Tyr or Asp or His or Ser or Thr or Ala or Leu or Val or Gln or Absent or Phe
  misc_feature (353)..(353): Asp or Glu or Asn or Absent or Arg or Pro or Ala or Val or Lys or Ile or Gly or Cys or Met or Leu or Tyr or His
  misc_feature (354)..(354): Cys or Pro or Val or Ser or Met or Leu or Glu or Phe or Thr or Lys or Gln or Absent or Asp or Gly or Arg or Ala or Ile or Asn or His or Tyr
  misc_feature (355)..(355): Pro or Absent or Ile or Lys or Ser or Ala or Val or Phe or Leu or Gly or Thr or Tyr or Asp or Arg or Glu or His or Asn
  misc_feature (356)..(356): Tyr or Ile or Phe or Glu or Thr or Asn or Ser or Asp or Val or Gly or Arg or Absent or Lys or Ala or Leu or Gln or His or Pro
  misc_feature (357)..(357): Cys or Asp or Asn or Thr or Gln or Ala or Absent or Gly or Arg or Pro or His or Tyr
  misc_feature (358)..(358): His or Tyr or Phe or Lys or Cys or Asp or Absent or Gly or Val or Gln or Glu or Leu
  misc_feature (359)..(359): Absent or Thr or Arg or Lys
  misc_feature (360)..(360): Absent or Asn or Thr or Pro
  misc_feature (361)..(361): Absent or Gln
  misc_feature (362)..(362): Absent or Trp
  misc_feature (363)..(363): Absent or Glu or Gly or Asn or Phe or Arg or Tyr or His
  misc_feature (364)..(364): Glu or Asn or Gln or Gly or Tyr or Trp or Ala or Pro or His or Phe or Absent or Lys or Thr or Cys or Leu
  misc_feature (365)..(365): Leu or Pro or Val or Ile or Absent or Cys or Gly or Asn or Thr
  misc_feature (366)..(366): Asp or Ser or Arg or Leu or Met or Lys or Pro or Ala or Tyr or Asn or Thr or Glu or Absent or Val or His or Cys or Gly or Phe
  misc_feature (367)..(367): Asp or Ser or Thr or Ala or Arg or His or Asn or Gly or Lys or Gln or Absent or Tyr or Glu or Cys
  misc_feature (368)..(368): Leu or Val or Ile or Phe or Trp or Ala or Pro or Absent or Thr or Ser or Arg or Lys or Glu
  misc_feature (369)..(369): Gln or Phe or Glu or Asp or Ala or Asn or Tyr or Ser or Lys or Arg or Absent or Thr or Gly or Ile or Leu or His
  misc_feature (370)..(370): Ile or Lys or Asp or Ala or Gly or Glu or Gln or Absent or Arg or Ser or His or Leu or Asn
  misc_feature (371)..(371): Tyr or Leu or Ile or Val or Phe or Trp or Met or Cys or Absent
  misc_feature (372)..(372): Asp or Pro or Glu or Lys or Ala or Arg or Leu or Val or Gln or His or Ser or Ile or Tyr or Thr or Asn or Absent
  misc_feature (373)..(373): Asp or Phe or Leu or Trp or Tyr or Val or Ile or Met or Pro or Ser or Ala or Absent
  misc_feature (374)..(374): Thr or Ala or Tyr or Glu or Leu or Lys or Cys or Met or Phe or Asp or Pro or Ile or Val or Arg or Gln or Absent
  misc_feature (375)..(375): Val or Pro or Ser or Lys or Arg or Thr or Ala or Glu or Asp or His or Leu or Gln or Asn or Tyr or Absent
  misc_feature (376)..(376): Gly or Asp or Arg or Tyr or Lys or Asn or Gln or Glu or Phe or Leu or His or Cys or Ser or Thr or Absent
  misc_feature (377)..(377): Ile or Leu or Val or Ala or Thr or Ser or Cys or Met or X or Absent
  misc_feature (378)..(378): Leu or Phe or Ile or Val or Arg or Lys or Pro or Ala or Glu or Gly or Met or Asp or Absent
  misc_feature (379)..(379): Lys or Gln or Arg or Pro or Asn or Ser or Ala or Glu or Asp or Gly or His or Met or Thr or Ile or Val or Tyr or Absent
  misc_feature (381)..(381): Tyr or Leu or Ile or Val or Met or Cys or Ala or Thr
  misc_feature (382)..(382): Absent or Gly or Glu or Ala or Val or Leu or Arg or Lys or Thr or Asp or Gln or Asn or Ile
  misc_feature (383)..(383): Absent or Phe or Leu or Ile or Cys or Arg
  misc_feature (384)..(384): Absent or Ile or Gln or Lys or Ala or Arg or Thr or Ser or Phe or Glu or Cys or Met or Val or Gly or Tyr or Asp or Leu or Asn or His or Trp
  misc_feature (386)..(386): Gln or Ser or Lys or Met or Val or Absent or Ala or Arg or Leu or Tyr or Asn or His or Cys or Thr or Gly or Ile
  misc_feature (387)..(387): Gly or Asp or Lys or Ala or Asn or Glu or Gln or Thr or Arg or His or Ser or Met
  misc_feature (388)..(388): Lys or Asp or Leu or Ala or Phe or Ile or Asn or Pro or Glu or Ser or Gln or His or Trp or Absent or Val or Thr or Gly or Arg or Met
  misc_feature (390)..(390): Tyr or Phe or Cys or Lys or Pro or Val or Arg or Leu or Ala or Ile or Trp or His or Met
  misc_feature (391)..(391): Arg or Glu or Thr or Lys or Gln or Ala or Ile or Leu or Asp or Met or Tyr or Gly or His or Pro or Phe
  misc_feature (392)..(392): Ile or Phe or Leu or Arg or Val or Ala or Thr or Cys or Ser
  misc_feature (393)..(393): Ile or Val or Ala or Phe or Leu or Met or Gly or Cys or Thr
  misc_feature (394)..(394): Ile or Met or Leu or Val or Ser or Gly or Thr
  misc_feature (395)..(395): Val or Ile or Thr or Tyr or Phe or Cys or Ala or Leu
  misc_feature (399)..(399): Ser or Asp or Asn or Pro or Gln or Arg or Gly or Ala or Thr
  misc_feature (401)..(401): Ile or Leu or Ala or Val or Pro
  misc_feature (402)..(402): Gly or Ala or Asn or Glu or Ser or Arg or Asp or His
  misc_feature (403)..(403): Arg or Thr or Ser or Leu or Lys or Asn or Ala or Phe or Asp or His or Glu or Val
  misc_feature (405)..(405): Tyr or Ser or Ala or Leu or Lys or Ile or Thr or His or Met or Glu or Trp or Phe or Gly or Arg
  misc_feature (406)..(406): Phe or Leu or Tyr or Ser or Met or Thr or Gln or Ala or Val or Ile or His
  misc_feature (407)..(407): Ser or Thr or Pro or Leu or Asp or Gln or Lys or Arg or Gly or Asn or Glu or Ala
  misc_feature (408)..(408): Met or Glu or Thr or Arg or Lys or Leu or Gln or Ala or Asp or His or Trp or Val or Ile or Pro or Asn or Ser
  misc_feature (409)..(409): Glu or Ser or Asp or Ala or Thr or Gln or Lys or Met or Val or Gly or Asn or Pro or Ile or His or Arg
  misc_feature (410)..(410): Glu or Gln or Thr or Asp or Asn or Lys or Ala or Gly or Val or Phe or Cys or Met or Leu or Ser or Ile or Arg or His
  misc_feature (411)..(411): Phe or Tyr or Leu or Ile or Val or Ala or Met
  misc_feature (412)..(412): Arg or Lys or Trp or Ala or His or Asp or Glu or Asn or Ser or Leu or Met or Gly or Tyr or Val or Thr or Gln or Ile or Pro or Phe
  misc_feature (413)..(413): Arg or Glu or Pro or Val or Ile or Lys or Thr or Gly or Leu or Ala or Asp or Asn or Ser or Phe or Gln or Tyr or His
  misc_feature (414)..(414): Phe or Ala or Cys or Val or Pro or Met or Ile or Leu or Gly or Glu or Thr
  misc_feature (415)..(415): Asn or Ser or His or Gln or Arg or Leu or Ile or Thr or Trp or Glu or Met or Cys
  misc_feature (416)..(416): Asp or Asn or Glu or Phe or Gln or Leu or His or Gly or Ala or Arg or Thr or Lys or Met or Cys or Val or Ser
  misc_feature (417)..(417): Gly or Phe or Leu or His or Lys or Val or Ala or Met or Arg or Tyr or Gln or Ser or Glu or Trp or Asn
  misc_feature (418)..(418): Val or Met or Ile or Leu or Thr or Phe or Tyr
  misc_feature (419)..(419): Val or Asn or Leu or Met or Ile or Arg or Gln or Cys or Ala or Gly or Tyr or Glu or Lys or Phe or Asp or His or Thr
  misc_feature (420)..(420): Asn or Asp or Lys or Ser or Glu or Gln or Ala or Arg or Tyr or His or Leu or Met or Thr or Gly or Absent or Trp
  misc_feature (421)..(421): Arg or Lys or Thr or Leu or Ile or Val or Phe or Glu or Ala or Asp or Gln or Met or Absent or Ser or Asn
  misc_feature (422)..(422): Leu or Phe or Met or Thr or Val or Ile or Tyr or Absent or Ala
  misc_feature (423)..(423): Leu or Lys or Ala or Ser or Thr or Gln or Arg or Glu or Asn or Pro or Gly or Absent or Ile or Asp or His or Val or Cys or Phe
  misc_feature (424)..(424): Asp or Glu or Gly or Ser or Arg or Pro or Ala or Asn or Ile or Leu or Val or Lys or Gln or Cys or Tyr or Absent or His or Thr
  misc_feature (425)..(425): Leu or Asn or Glu or Gln or Cys or His or Ala or Asp or Thr or Arg or Phe or Met or Tyr or Absent or Val or Ser or Trp or Lys or Ile
  misc_feature (426)..(426): Absent or Pro or Asn or Ala or Met or Leu or Gly or Lys or Asp or Tyr
  misc_feature (427)..(427): Absent or Ala
  misc_feature (429)..(429): Val or Ile or Ala or Gly or Absent or Cys or Thr or Asn or Phe
  misc_feature (430)..(430): Lys or Val or Thr or Leu or Ser or Glu or Ile or Asn or His or Cys or Gln or Arg or Ala or Phe or Absent or Tyr or Met or Asp or Gly or Pro
  misc_feature (431)..(431): Val or Ile or Phe or Absent or Leu or Trp
  misc_feature (432)..(432): Ser or Asp or Glu or Lys or Gln or Asn or Leu or Absent or Thr or His or Ala or Val or Phe or Gly
  misc_feature (433)..(433): Ala or Asp or Glu or Gln or His or Ser or Gly or Arg or Trp or Phe or Tyr or Asn or Lys or Leu or Val or Thr or Met or X
  misc_feature (434)..(434): Thr or Ile or Val or Tyr or Leu or Phe or Ser or Met or Ala or Trp or Cys
  misc_feature (435)..(435): Tyr or Leu or Phe or Cys or Glu or Arg or Met or Ala or Ser or Gln or Val or Asn or Trp or His
  misc_feature (436)..(436): Phe or Tyr or Ile or Leu or Ala or His or Val or Thr or Ser or Cys or Met
  misc_feature (438)..(438): Pro or Arg or Leu or Thr or Tyr or Asp or Trp or Ile or Ala or Cys or Val or Absent or Gly
  misc_feature (439)..(439): His or Ser or Cys or Absent or Asp or Tyr or Thr or Ala or Ile
  misc_feature (440)..(440): Arg or Lys or Phe or Thr or Leu or His or Tyr or Ala or Gly or Val or Asp or Ile or Ser or Absent or Cys
  misc_feature (441)..(441): Pro or Ser or Asp or Glu or Leu or Thr or Asn or Phe or Lys or Arg or His or Tyr or Ala or Gly or Gln or Absent
  misc_feature (442)..(442): Asp or Glu or His or Lys or Asn or Gly or Ala or Ser or Arg or Gln or Trp or Thr or Pro or Leu or Absent or Ile or Tyr or Phe
  misc_feature (443)..(443): Glu or Asp or Asn or Gln or Ser or Lys or Ala or Gly or Thr or Tyr or Absent or His or Met or Pro or Arg or Leu
  misc_feature (444)..(444): Gly or Ser or Asn or Gln or Asp or Glu or Arg or Pro or Absent or Thr or Ala or Cys or Tyr or Val or Leu
  misc_feature (445)..(445): Absent or Ile or Asp or Gly or Asn or Arg or Glu or His or Phe or Val or Gln or Pro or Thr or Ala or Lys or Ser or Met
  misc_feature (446)..(446): Absent or Pro or His or Val or Gly or Ala or Glu or Phe or Asn or Lys
  misc_feature (447)..(447): Absent or Glu or Gly or Pro or Lys or Ala or Val or Thr or Ser or Gln or Cys
  misc_feature (448)..(448): Absent or Thr or Val or Glu or Ile or Asn or Leu or Gln or Pro or Lys
  misc_feature (449)..(449): Absent or His or Val or Arg or Ile or Ser or Gly or Glu or Leu or Ala or Pro or Asp or Asn
  misc_feature (450)..(450): Absent or Pro or Ala or Glu or Ile or Gly or Val or Lys or Arg or Met or Asp or Gln
  misc_feature (451)..(451): Absent or Val or Gly or Asp or Gln or Glu or Pro or Ala or Arg or Leu or Lys or Tyr or Phe
  misc_feature (452)..(452): Absent or Leu or Tyr or Phe or Ala or Pro or Ser or Arg or Cys or Lys or Glu or Gln
  misc_feature (453)..(453): Absent or Gly or Ser or Ala or Thr or Arg or Lys or Leu or Glu or Asp or Ile or Val or Asn or Gln
  misc_feature (454)..(454): Absent or Gly or Asp or Glu or Gln or Ser or Val or His or Met or Ile or Thr or Arg or Cys or Asn or Lys or Leu or Pro or Ala or Tyr
  misc_feature (455)..(455): Absent or Leu or Gly or Asn or Ser or Glu or Arg or Pro or Ala or Gln or Lys or His or Thr or Val or Trp or Asp or Phe
  misc_feature (457)..(457): Ser or Asn or Pro or Ile or Ala or Asp or Glu or Val or Leu or His or Thr or Arg or Gly or Gln or Phe or Lys or Tyr or Met
  misc_feature (462)..(462): Gly or Glu or Arg or Lys or Gln or Ala or His or Ser or Asn or Leu or Met or Tyr
  misc_feature (463)..(463): Ile or Thr or Ala or Val or Leu or Pro or Ser or Asp or Asn
  misc_feature (465)..(465): Leu or Met or Trp or X
  misc_feature (466)..(466): Ile or Phe or Leu or Met or Val or Trp or Pro or Tyr
  misc_feature (467)..(467): Asn or Ser or Thr or Glu or Lys or Asp or Gln or Leu or His or Phe or Met or Ile or Arg or Tyr or Val or Ala
  misc_feature (468)..(468): Glu or Lys or Pro or Ser or Gly or Asn or Asp or Cys or His or Ala or Arg or Tyr or Gln or Thr or Met or Val or Ile or Leu or Trp
  misc_feature (469)..(469): Ala or Val or Tyr or Leu or Trp or Phe or Ser or Gln or Ile or Met or Gly
  misc_feature (470)..(470): Leu or Ile or Met or Ala or Gln or Phe or Ser or Val or Arg or Lys or Thr or Glu or Gly or Cys or Tyr
  misc_feature (471)..(471): Ser or Glu or Asp or Lys or Arg or Absent or Thr or Ala or Asn or Gln or His or Gly or Tyr or Trp or Leu
  misc_feature (472)..(472): Asp or Asn or Glu or Ser or Tyr or His or Lys or Absent or Arg or Gly or Gln or Ala or Thr or Val or Phe
  misc_feature (473)..(473): Phe or Tyr or Pro or Thr or Gly or Lys or His or Asn or Glu or Asp or Gln or Trp or Cys or Leu or Absent or Ala or Met or Ile or Val
  misc_feature (474)..(474): Arg or Lys or Glu or Ala or Val or Leu or Ser or Phe or Thr or Absent or Gly or Pro or Gln or Asp or Asn or His or Cys
  misc_feature (475)..(475): Val or Tyr or Phe or Leu or Ile or Met or Gly or Asp or His or Asn or Gln or Glu or Cys or Ala or Absent or Arg or Thr
  misc_feature (476)..(476): Asp or Ala or Asn or Absent or Glu or Cys or Arg or Lys or Gln or Ser
  misc_feature (477)..(477): Ile or Leu or Lys or Met or Pro or Thr or Val or Ser or Arg or Phe or Absent or Gly
  misc_feature (478)..(478): Absent or Phe or Cys
  misc_feature (479)..(479): Absent or Glu
  misc_feature (480)..(480): Absent or Val or Leu or Ile or Ala or Ser or Asp or Thr or Asn or Lys or Cys or Gln or Pro or Glu or Gly or Phe
  misc_feature (481)..(481): Absent or Asp or Ile or Ser or Asn or Glu or Thr or Leu or Ala or Val or Pro
  misc_feature (482)..(482): Absent or Leu or Val or Ile or Ala or Pro or Asn or Phe or Gly or Arg or Thr or Met
  misc_feature (483)..(483): Gly or Pro or Ala or His or Gln or Ser or Asn or Glu or Lys or Asp or Thr or Arg or Val or Leu or Absent
  misc_feature (484)..(484): Gly or Ser or Glu or Tyr or Arg or Lys or Gln or Asn or Asp or Thr or His or Ala or Leu or Absent or Cys or Val
  misc_feature (485)..(485): Ser or Val or Ala or Cys or Thr or Gly or Gln or Ile or Leu or Absent or Arg
  misc_feature (486)..(486): Leu or Ile or Phe or Trp or Tyr or Ala or Val or Thr or Pro or His or Absent or Met
  misc_feature (487)..(487): Val or Met or Leu or Phe or Ile or Cys or Ser or Thr or Ala or Absent
  misc_feature (488)..(488): Ile or Val or Ala or Leu or Absent or Phe
  misc_feature (491)..(491): Arg or His or Asp or Gln or Lys or Ser or Ala or Thr or Asn or Absent or Gly or Ile
  misc_feature (492)..(492): Asp or Asn or Absent
  misc_feature (493)..(493): Asp or Glu or Pro or Gln or Ala or Ile or Met or His or Ser or Trp or Leu or Phe or Arg or Gly or Val or Absent or Lys or Thr or Asn
  misc_feature (494)..(494): Val or Ile or Thr or Ser or Arg or Pro or Ala or Asp or Glu or Absent or Lys or Gly or Cys or Asn
  misc_feature (496)..(496): Gly or Val or Lys or Ile or Met or Leu or Ser or Arg or Asp or Absent or Ala or Thr or X
  misc_feature (497)..(497): Gln or Glu or Gly or Leu or Asp or Ile or Lys or Ala or Thr or Arg or Cys or Met or His or Absent or Val
  misc_feature (498)..(498): Leu or Phe or Cys or Met or Ala or Thr or Pro or Val or Absent or Ile or Ser or Arg
  misc_feature (499)..(499): Ala or Ser or Gly or Ile or Absent or Cys or Pro
  misc_feature (500)..(500): Arg or Lys or Asp or Glu or Gln or Leu or Ser or His or Asn or Ala or Val or Ile or Gly or Phe or Absent or Thr
  misc_feature (501)..(501): Asn or Arg or Ser or Ala or Lys or Glu or Asp or Met or Thr or Val or Gln or Pro or Absent or Phe or Gly or Leu
  misc_feature (502)..(502): Leu or Ile or Met or Ala or Val or Ser or Thr or Lys or Absent or Phe or Arg or Glu or Asn or Pro
  misc_feature (503)..(503): Gly or Lys or Cys or Asn or Ala or Asp or Glu or Val or Thr or Absent or His or Arg or Ser or Gln
  misc_feature (504)..(504): Leu or Cys or Val or Ile or Ala or Thr or Met or Gly or Asn or Absent or Gln or His or Phe or Ser or Trp
  misc_feature (505)..(505): Pro or Arg or Asn or Glu or Gln or Ser or Thr or Lys or Val or Ile or Gly or Ala or Absent or Leu or Tyr or His
  misc_feature (506)..(506): Phe or Ala or Gly or Ser or Arg or Absent or Asn or Thr or Pro or Lys or Val or His or Cys or Gln or Leu or Glu or Ile or Tyr or Met
  misc_feature (507)..(507): Arg or Ile or Leu or Phe or Thr or Val or Ala or Absent or Ser or Lys or Gly or Pro or Cys or Asn or Tyr or His
  misc_feature (508)..(508): Ile or Leu or Tyr or Pro or Lys or Arg or Gln or His or Phe or Trp or Absent or Val or Ala or Ser or Met or Thr
  misc_feature (509)..(509): Val or Leu or Ile or Tyr or Arg or Gln or Absent or Met or Phe or His or Cys
  misc_feature (510)..(510): Ser or Arg or Gln or Asp or Gly or His or Lys or Asn or Val or Ile or Ala or Met or Leu or Pro or Absent or Glu or Thr or Cys or Tyr or Phe
  misc_feature (511)..(511): His or Glu or Lys or Gly or Gln or Pro or Arg or Ser or Leu or Thr or Cys or Ala or Asn or Tyr or Met or Val or Asp or Ile or Phe
  misc_feature (512)..(512): Absent or Ala or Asn or Leu or Gly or His or Pro or Gln or Glu or Val or Arg or Ser or Asp or Thr or Lys or Phe
  misc_feature (513)..(513): Absent or Thr or Asp or Pro
  misc_feature (514)..(514): Absent or Asp or Thr
  misc_feature (515)..(515): Absent or Asp
  misc_feature (516)..(516): Absent or Leu or Lys
  misc_feature (517)..(517): Absent or Lys
  misc_feature (518)..(518): Absent or Glu
  misc_feature (519)..(519): Absent or Lys
  misc_feature (520)..(520): Absent or Gly
  misc_feature (521)..(521): Absent or Leu
  misc_feature (522)..(522): Absent or Glu
  misc_feature (523)..(523): Absent or Glu
  misc_feature (524)..(524): Absent or Val
  misc_feature (525)..(525): Absent or Cys
  misc_feature (526)..(526): Absent or Ala
  misc_feature (527)..(527): Absent or Leu
  misc_feature (528)..(528): Absent or Ala or Ile or Lys or Asp or Gln or Glu or Gly or Ser or His
  misc_feature (529)..(529): Absent or Thr or His or Glu or Ile or Lys or Asn or Gly or Ser
  misc_feature (530)..(530): Absent or Thr or His or Phe or Leu or Cys or Met
  misc_feature (531)..(531): Absent or Asp or Thr or Ser or Asn or Gly
  misc_feature (532)..(532): Absent or Trp
  misc_feature (533)..(533): Absent or Asp or Glu or Gln or Pro or Lys or Ile or Leu or Phe or Ser or Thr or Ala or Asn or Met
  misc_feature (534)..(534): Absent or Gln or Met or Ser or Ala or Glu or Lys or Asp or His or Leu or Thr or Arg
  misc_feature (535)..(535): Absent or Val or Ile
  misc_feature (536)..(536): Absent or Ala or Val or Thr or Glu or His or Cys or Ser or Gly or Leu
  misc_feature (537)..(537): Absent or Glu or Ser or Thr or Asp or Asn or Lys or Arg or His or Gln
  misc_feature (538)..(538): Absent or Phe or Ala or Arg or Lys or Gln or Glu or Tyr or Asp
  misc_feature (539)..(539): Absent or Leu or Ile
  misc_feature (540)..(540): Absent or Phe or Ile or Leu or Thr or Met
  misc_feature (541)..(541): Absent or Ala or Asn or Thr or Gln or Ser or Lys or Gly or Arg or Val
  misc_feature (542)..(542): Absent or Gly or Asp or Pro or Ala or Asn or Ser or Glu or Gln or Lys or Thr
  misc_feature (543)..(543): Absent or Thr or Pro or Ala or Lys or Leu
  misc_feature (544)..(544): Absent or Val or Gln
  misc_feature (545)..(545): Absent or Thr or Ala
  misc_feature (546)..(546): Absent or Asn or Asp or Ala
  misc_feature (547)..(547): Absent or Cys or Pro or Ile or Leu
  misc_feature (548)..(548): Absent or Gly or Lys or Leu
  misc_feature (549)..(549): Absent or Lys or Gly or Asp or Arg or Cys or Gln
  misc_feature (550)..(550): Absent or Arg or Leu or Ser or Gln or Glu or Asp
  misc_feature (551)..(551): Absent or Gly or Gln or Arg or Asn
  misc_feature (552)..(552): Absent or Ser or Arg or His or Pro or Gln or Lys or Gly
  misc_feature (553)..(553): Absent or Glu or Ala or Asn or Tyr or Phe or His or Pro or Asp or Ser or Gly
  misc_feature (554)..(554): Absent or Arg or Gly or Leu or Glu or Ser or Tyr or Phe or Asp or Thr or Pro or Cys or Asn or Trp or His or Ala or Val or Lys or Gln
  misc_feature (555)..(555): Absent or Lys or Cys or Glu or Ser or Tyr or Thr or Val or Phe or His or Ile or Gln or Arg or Pro or Ala or Trp or Asn or Met or Gly or Leu or Asp
  misc_feature (556)..(556): Absent or Ala or Gly or Arg or Val or His or Glu or Tyr or Gln or Ser or Leu or Asp or Asn or Thr or Pro or Lys or Ile
  misc_feature (557)..(557): Absent or Glu or Ser or Leu or Arg or Tyr or His or Val or Thr or Lys or Gln or Asp or Ala or Pro or Asn or Cys or Met or Ile or Phe
  misc_feature (558)..(558): Absent or Val or Ile or Tyr or Gly or Thr or Leu or Glu or Arg or Pro or Ala or Asp or Gln or Phe or Lys or Met or His or Asn or Ser or Trp or Cys
  misc_feature (559)..(559): Absent or Arg or Gln or Glu or Thr or Lys or Ser or Ile or Ala or Val or Asn or Leu or Pro or Phe or Tyr or His or Gly or Asp
  misc_feature (560)..(560): Absent or Arg or Ala or Asp or Cys or Ser or Asn or Gly or Phe or Glu or Leu or Ile or Met or Gln or Val or Thr or Tyr or Lys or His
  misc_feature (561)..(561): Absent or Thr or Lys or Asn or Ile or Glu or Arg or Gln or Val or Ala or Ser or Pro or Asp or Gly or Leu or Phe or Trp
  misc_feature (562)..(562): Absent or Thr or Met or Ser or Val or Ala or Lys or Phe or His or Glu or Gln or Leu or Gly or Arg or Pro or Asp or Tyr or Ile or Trp
  misc_feature (563)..(563): Absent or Lys or Asn or Arg or His or Glu or Asp or Ala or Ile or Leu or Tyr or Cys or Val or Trp or Met or Phe or Thr or Gln or Ser or Gly
  misc_feature (564)..(564): Absent or Glu or Val or Ile or Gly or Ala or Gln or Asp or Pro or Arg or Lys or Asn or Thr or Ser or Leu
  misc_feature (565)..(565): Absent or Thr or Ala or Ser or Leu or Val or Tyr or His or Pro or Asp or Gln or Glu or Lys or Phe or Gly
  misc_feature (566)..(566): Absent or Asp or Ala or Thr or Gln or Asn or Tyr or Lys or Ser or Pro or Val or His or Gly or Leu or Arg or Phe or Met or Glu or Cys
  misc_feature (567)..(567): Absent or Ile or Val or Asp or Ala or Gly or Thr or Ser or Phe or His or Glu or Pro or Arg or Gln or Cys or Tyr or Leu
  misc_feature (568)..(568): Absent or Tyr or Asp or Ala or Gln or Ser or Lys or His or Asn or Thr or Arg or Glu or Pro or Gly or Ile or Leu or Phe
  misc_feature (569)..(569): Absent or Val or Leu or Ile or Arg or Ala or Glu or Pro or Phe or Ser
  misc_feature (570)..(570): Absent or Ser or Arg or Ala or Lys or Gln or Glu or Asp or Asn or Thr or Leu or Phe or Pro or Gly or Ile
  misc_feature (571)..(571): Absent or Leu or Val or Ile or Ser or Met or Asp or Phe or Tyr or Asn or Cys
  misc_feature (572)..(572): Absent or Asn or Gln or Ala or Cys or Trp or Asp or Phe or Leu or Glu
  misc_feature (573)..(573): Absent or Leu or Phe or Lys or Asn
  misc_feature (574)..(574): Absent or Asp or Asn or Ala or Glu or Leu
  misc_feature (575)..(575): Absent or Gly or Ser or Gln or Glu or Leu or Arg or His or Lys or Asn or Ala
  misc_feature (576)..(576): Absent or Asn or Asp or Pro or Thr or Lys or Cys or Glu or Ala or Gln or Gly
  misc_feature (577)..(577): Absent or Gly or Gln or Ala or Lys or Asp or His or Glu or Thr or Val or Ser or Phe or Ile
  misc_feature (578)..(578): Absent or Gly or Thr or Lys or Asn or Glu or Gln or His or Val or Met or Ser or Pro or Asp or Tyr or Phe
  misc_feature (579)..(579): Absent or Cys or Ser or Gly or Ala or Val or Ile or Asn or Arg or Thr or Glu
  misc_feature (580)..(580): Absent or Asp or Val or Ser or Asn or Ala or Lys or Cys or Glu or Gln or Thr or Ile
  misc_feature (581)..(581): Absent or Ile or Val or Phe or Asp or Leu
  misc_feature (582)..(582): Absent or Ser or Asp or Glu or Lys or Asn or Gln or His or Thr or Cys
  misc_feature (583)..(583): Absent or Thr or Ser or Trp or Tyr or Arg
  misc_feature (584)..(584): Absent or Gly or Pro or Asn or Val or Ile or Asp or Glu
  misc_feature (585)..(585): Absent or Leu or Ile or Val or Met or Ala or Lys
  misc_feature (586)..(586): Absent or Gly or Pro or Ala or Asp or His or Asn or Lys or Leu
  misc_feature (587)..(587): Absent or Phe or Asp or Asn
  misc_feature (588)..(588): Absent or Phe or Leu or Ala or Glu
  misc_feature (589)..(589): Absent or Asp or Thr or Leu
  misc_feature (590)..(590): Absent or His or Ile
  misc_feature (591)..(591): Absent or Met or Phe
  misc_feature (592)..(592): Absent or Leu or Ile or Glu
  misc_feature (593)..(593): Absent or Glu or Asp
  misc_feature (594)..(594): Absent or Gln or Phe
  misc_feature (595)..(595): Absent or Ile or Val or Leu or Ser
  misc_feature (596)..(596): Absent or Gly or Ala or Arg or Ser or Lys
  misc_feature (597)..(597): Absent or Lys or Thr or Val or Ile or Arg or Ala or Leu
  misc_feature (598)..(598): Absent or His or Gly or Ala or Glu or Val
  misc_feature (599)..(599): Absent or Ser or Gly or Ala or Glu or Lys or Gln or Leu or Thr
  misc_feature (600)..(600): Absent or Gly or Asn or Lys or Glu or Ser or Val or Asp or Ala or Arg or Cys or Ile or Met or Tyr or Phe or Leu or Thr
  misc_feature (601)..(601): Absent or Met or Phe or Ile or Thr or His or Ser or Ala or Glu or Leu or Arg or Asp or Lys or Pro
  misc_feature (602)..(602): Absent or Asp or Glu or Gly or Ser or Arg or Cys or Gln or Lys or Ile or Leu or Val or Thr or Ala or Tyr or Asn
  misc_feature (603)..(603): Absent or Leu or Met or Gln or Lys or Glu or Gly or Ser or Val or Asn or Ile or Pro
  misc_feature (604)..(604): Absent or Thr or Arg or Asp or Asn or Glu or His or Tyr or Gln or Ser or Lys or Val or Leu or Trp or Ala or Gly or Cys
  misc_feature (605)..(605): Absent or Ile or Leu or Val or Cys or Pro or Thr or Glu or Ala or Phe or Gln or Lys or Arg or Asp or Asn or Gly or Tyr or Met
  misc_feature (606)..(606): Absent or Arg or Gln or Lys or Ser or Ile or Leu or Tyr or Asn or Glu or Thr or His or Asp or Ala or Pro or Gly or Val or Phe
  misc_feature (607)..(607): Absent or Val or Ala or Cys or Thr or Lys or Gln or Glu or Pro or Gly or Arg or Phe or Asn or Leu or Ser or Asp or His or Met
  misc_feature (608)..(608): Absent or Lys or Ser or Arg or Gln or Gly or Thr or Asp or Val or Glu or Phe or Tyr or His or Leu or Ala or Asn or Pro or Ile
  misc_feature (609)..(609): Absent or Gly or Arg or Ala or Leu or Lys or Asp or Thr or Tyr or Ser or Pro or Gln or Asn or Glu or Ile or Val
  misc_feature (610)..(610): Absent or Asp or Leu or Tyr or Asn or Arg or Ala or Trp or Glu or Gln or Met or His or Lys or Thr or Val or Phe
  misc_feature (611)..(611): Absent or Leu or Tyr or Gln or Glu or Ser or Arg or Lys or Ala or His or Gly or Thr or Pro or Ile
  misc_feature (612)..(612): Absent or Glu or Tyr or His or Gln or Asp or Trp or Cys or Leu or Thr or Gly or Pro or Asn or Met or Ile or Ala or Ser
  misc_feature (613)..(613): Absent or Val or Ile or Ala or Ser or Pro or Gln or Lys or His or Gly or Asp or Leu or Arg or Glu
  misc_feature (614)..(614): Absent or Asp or Gly or Thr or Arg or Val or Asn or Leu or Trp or Glu or Phe or Ser or Pro or Gln or Ala
  misc_feature (615)..(615): Absent or Glu or Asp or Ile or His or Lys or Pro or Asn or Arg or Tyr or Gln or Ser or Ala or Gly or Leu
  misc_feature (616)..(616): Absent or His or Ala or Thr or Asp or Tyr or Leu or Phe or Ser or Ile or Val or Gly or Cys or Asn or Glu
  misc_feature (617)..(617): Absent or His or Pro or Leu or Ile or Tyr or Val or Ser or Arg or Gly or Lys or Glu or Ala or Thr or Cys or Phe or Trp or Gln or Asn or Asp
  misc_feature (618)..(618): Absent or Thr or Leu or Ser or Asp or Gln or Ile or Arg or Val or Gly or Ala or Glu or Lys or Asn
  misc_feature (619)..(619): Absent or Ile or Val or Leu or Ser or Ala or Cys or Arg or Phe or Tyr or Thr or His or Gly or Asn or Gln or Trp or Asp
  misc_feature (620)..(620): Absent or Glu or Pro or Val or Ala or Gln or Arg or Asp or Asn or Leu or Tyr or Ser or Cys or Lys or Gly or Thr or His
  misc_feature (621)..(621): Absent or Asp or Ala or Ser or Lys or Asn or Gly or Gln or Arg or Glu or Thr or Leu or Tyr or Pro or His
  misc_feature (622)..(622): Absent or Thr or Ile or Val or Ala or Glu or His or Leu or Lys or Phe or Gly or Asn or Arg or Pro
  misc_feature (623)..(623): Absent or Ala or Gly or Val or Leu or Ser or Thr or Pro or Arg or Lys or Gln or Tyr or Glu or Asp or His or Asn or Phe
  misc_feature (624)..(624): Absent or Ile or Leu or Gln or Pro or Asn or Ala or Arg or Glu or Ser or Lys or Cys or Phe or Asp or Gly or Thr or Val
  misc_feature (625)..(625): Absent or Ala or Ser or Val or Arg or Pro or Gly or His or Asp or Thr or Leu or Ile or Phe or Tyr or Met
  misc_feature (626)..(626): Absent or Leu or Ile or Val or Ala or Asp or Ser or Pro or Thr or Arg or His or Asn or Lys
  misc_feature (627)..(627): Absent or Gly or Arg or Leu or Thr or Glu or Asp or Ala or Ser or Gln or Lys or Asn or Ile or Trp or Phe or His or Cys or Pro
  misc_feature (628)..(628): Absent or Glu or Gln or Val or Ser or Ala or Thr or Asn or Asp or Arg or Gly or Ile or Trp or Leu or Phe or His or Tyr or Lys
  misc_feature (629)..(629): Absent or Cys or Ala or Pro or Arg or Lys or Ile or Val or Ser or Glu or Leu or Thr or Asp or Met or Trp or Tyr or Phe or Asn or Gln
  misc_feature (630)..(630): Absent or Ile or Leu or Arg or Val or Cys or Ala or Phe or Asp or Pro or Lys or Ser or Glu or Gly or Thr or Met or Asn or Gln
  misc_feature (631)..(631): Absent or Tyr or Arg or Lys or Asn or Ser or Leu or Pro or Gly or Ala or Val or Glu or His or Gln or Asp or Thr or Phe or Met or Ile
  misc_feature (632)..(632): Absent or Gln or Thr or Ser or Arg or Lys or Glu or Leu or Asn or Ile or Pro or Asp or Gly or Val or Trp or Phe or His or Ala
  misc_feature (633)..(633): Absent or Ala or Thr or Arg or Glu or His or Ser or Ile or Leu or Gln or Lys or Asn or Pro or Asp or Val or Trp or Met or Cys or Gly or Tyr
  misc_feature (634)..(634): Absent or Leu or Ile or Val or Arg or Asn or Ala or Gly or Gln or Lys or Phe or Tyr or Ser or Thr or Asp or Pro or His or Glu or Cys
  misc_feature (635)..(635): Absent or Gly or Asp or Asn or Arg or Glu or Ala or Leu or Ile or Lys or Ser or His or Pro or Trp or Cys or Thr or Tyr
  misc_feature (636)..(636): Absent or Ser or Asp or Thr or Gln or Asn or Lys or Glu or Arg or Phe or His or Ala or Gly or Val or Pro or Leu or Trp or Ile
  misc_feature (637)..(637): Absent or Lys or Trp or Ala or Asp or Pro or Glu or Ser or Cys or Arg or Gln or Leu or His or Asn or Val or Thr or Phe or Gly
  misc_feature (638)..(638): Absent or Arg or Trp or Ser or Ile or Asn or Val or Thr or Ala or Gly or Cys or Gln or Pro or Glu or Asp or His
  misc_feature (639)..(639): Absent or Gly or Gln or Ala or Asp or Arg or Glu or Thr or Val or Ile or Lys or Pro or Ser or Leu or Phe
  misc_feature (640)..(640): Absent or Ile or Leu or Ala or Arg or Glu or Asp or Ser or Thr or Pro or Gly or Val or His
  misc_feature (641)..(641): Absent or Glu or Asn or Ala or Thr or Gly or Ser or Gln or Cys or Lys or Arg or Pro or Leu or Ile or Val or Asp
  misc_feature (642)..(642): Absent or Arg or Leu or Ala or Pro or Gly or Thr or Ser or Asp or Val or Glu or His
  misc_feature (643)..(643): Absent or Tyr or Phe or Ala or Glu or Val or Gly or Asp or Arg or Gln or Lys or Ser or Pro or Leu or His
  misc_feature (644)..(644): Absent or Gly or Arg or Glu or Thr or Pro or Leu or Tyr or Ser or Gln or Ala or Asp or Ile or Val
  misc_feature (645)..(645): Absent or Asn or Lys or Val or Ser or Leu or His or Pro or Thr or Gly or Glu
  misc_feature (646)..(646): Absent or Ala or Leu or Phe or Asp or Glu or Gly or Lys or Val or Pro
  misc_feature (647)..(647): Absent or Phe or Leu or Glu or Thr or Lys or Ser or Pro or His or Ala or Gly or Asp
  misc_feature (648)..(648): Absent or Glu or Gln or Arg or Asp or Gly or Ala or Thr or Ser or Val or Lys
  misc_feature (649)..(649): Absent or Tyr or Phe or Gln or Leu or Lys or Pro or Ala or Trp or Glu or Val or Met or Ile
  misc_feature (650)..(650): Absent or Ala or Thr or Val or Tyr or Ile or Ser or Trp or Cys or Gly or Leu or Asp
  misc_feature (651)..(651): Absent or Leu or Ile or Pro or Arg or Gly or Lys or His or Gln or Val or Thr or Ala
  misc_feature (652)..(652): Absent or Pro or Glu or Ser or Ile or Ala or Arg or Trp or Asp or Val or Asn
  misc_feature (653)..(653): Absent or Met or Ile or Glu or Gln or Gly or Pro or Thr or Ser
  misc_feature (654)..(654): Absent or Asp or Lys or Pro or Ser or Ala or Thr or Phe
  misc_feature (655)..(655): Absent or Asp or Glu or Val or Ser or Thr or Pro or Ala
  misc_feature (656)..(656): Absent or Cys or Ser or Ala or Ile or Glu or Gln or Val or Thr
  misc_feature (657)..(657): Absent or Leu or Lys or Ile or Gln or Arg or Glu or Ser or Asn or Pro or Gly or Ala or Thr
  misc_feature (658)..(658): Absent or Cys or Ala or Ser or Gly or Gln or Asn or Glu or Pro or Thr
  misc_feature (659)..(659): Absent or Gln or Cys or Thr or Glu or Ser or Lys or Asn or Arg or His or Pro or Trp or Val or Gly or Met
  misc_feature (660)..(660): Absent or Val or Ile or Ala or Cys or Gly or Lys or Thr or Arg or Gln
  misc_feature (661)..(661): Absent or Cys or Ala or Gln or Ile or Thr or Leu or Ser or Arg or Gly or Asp
  misc_feature (662)..(662): Absent or Leu or Ile or Met or Gly or Asp or Ala
  misc_feature (663)..(663): Absent or Asp or Lys or His or Pro or Ala
  misc_feature (664)..(664): Absent or Phe or Ile or Leu or Gly or Asn or Arg or Thr
  misc_feature (665)..(665): Absent or Gly or Ser or Cys or Asn or Asp or Thr or Val or Lys
  misc_feature (666)..(666): Absent or Gly or Asn or Ala or His or Glu or Tyr
  misc_feature (667)..(667): Absent or Arg or Met or Leu or Val
  misc_feature (668)..(668): Absent or Pro or Ser or Ala or Thr or Arg or Asn or His or Lys
  misc_feature (669)..(669): Absent or Trp or Phe or Ser or His or Tyr or Ala or Val or Leu or Lys
  misc_feature (670)..(670): Absent or Leu or Cys or Phe or Ile or Gly or Asp
  misc_feature (671)..(671): Absent or Val or Asp or Lys or Ser or Asn or Glu or Phe or Cys
  misc_feature (672)..(672): Absent or Trp or Phe or Leu or Tyr or Glu or Gly or Ile
  misc_feature (673)..(673): Absent or Asp or Lys or Asn or Gln or Glu or Ser or Ala or Leu or Pro
  misc_feature (674)..(674): Absent or Ala or Gly or Val or Arg
  misc_feature (675)..(675): Absent or Glu or Gln or Asn or Lys or His or Cys or Asp or Ser or Thr or Gly or Val
  misc_feature (676)..(676): Absent or Phe or Tyr or Gly or Ile or Ala or Gln
  misc_feature (677)..(677): Absent or Asn or Thr or Ser or Lys or Pro or Gly or Glu or Asp or Gln or Ile
  misc_feature (678)..(678): Absent or Arg or Lys or Leu or His or Tyr or Ser or Ile or Glu or Ala or Asp or Thr
  misc_feature (679)..(679): Absent or Glu or Lys or Ser or Gln or Asp or Ala or Pro or Val or Arg or Gly
  misc_feature (680)..(680): Absent or Lys or Phe or His or Met or Arg or Asn or Gln or Val or Ser
  misc_feature (681)..(681): Absent or Ile or Val or Ala or Leu or Thr or Asp or Pro or Asn
  misc_feature (682)..(682): Absent or Gly or Leu or Trp
  misc_feature (683)..(683): Absent or Glu or Gly or Asp or Thr or Ala or Asn or Met or Pro or Lys
  misc_feature (684)..(684): Absent or Met or Leu or Phe or Ala or Gly or Thr
  misc_feature (685)..(685): Absent or Pro or Ala or Asp or Ser or Asn or Val or Gly or Thr
  misc_feature (686)..(686): Absent or Thr or Val or Gly or Ser or His
  misc_feature (687)..(687): Absent or Glu or Gln or His or Asp or Asn or Ser or Ala or Pro or Lys
  misc_feature (688)..(688): Absent or Met or Leu or Arg or Val or Phe or Asp
  misc_feature (689)..(689): Absent or Phe or Val or Ile or Thr or Ala or Tyr or His
  misc_feature (690)..(690): Absent or Leu or Pro or Glu or Ser or Tyr or Val or Lys or Thr
  misc_feature (691)..(691): Absent or His or Glu or Tyr or Trp or Ala
  misc_feature (692)..(692): Absent or Phe or Glu or Asn or Asp or Pro or Ser
  misc_feature (693)..(693): Absent or Phe or Leu or Ile or Glu or Ala or Gly
  misc_feature (694)..(694): Absent or Lys or Gln or Tyr or Arg or His or Pro or Ile or Leu
  misc_feature (695)..(695): Absent or Ser or Arg or Cys or Val or Trp or Gly
  misc_feature (696)..(696): Absent or Leu or Ile or Phe or Tyr or Lys or Ala or Val
  misc_feature (697)..(697): Absent or Ser or Thr or Cys or Ala or Ile or Val or Asp or Phe or Lys
  misc_feature (698)..(698): Absent or Asp or Ser or Tyr or Cys or Phe or Gly or Glu or Ile or Arg or Ala
  misc_feature (699)..(699): Absent or Ala or Asn or Ser or Lys or Thr or Gly or Pro
  misc_feature (700)..(700): Absent or Ala or Leu or Ser or Met or Thr or Gly
  misc_feature (701)..(701): Absent or Lys or Gly or Ala or His or Leu or Met or Arg or Phe or Pro or Asp
  misc_feature (702)..(702): Absent or Met or Ala or Leu or Ile or Val or Cys or Glu or Asp or Lys
  misc_feature (703)..(703): Absent or Asn or Thr or Ser or Gly or Glu or Ala
  misc_feature (704)..(704): Absent or Leu or Ile or Tyr or Gly or Asp or His or Glu
  misc_feature (705)..(705): Absent or Asn or His or Ile or Gln or Lys or Ala or Arg or Gly
  misc_feature (706)..(706): Absent or Ile or Leu or Val or Met or Glu or Ala or Pro or Asn
  misc_feature (707)..(707): Absent or Lys or Glu or Ser or Asp or Tyr or Asn or Ala or Val or Ile or Pro
  misc_feature (708)..(708): Absent or Ala or Val or Ile or Thr or Ser or Lys or Pro or Asn
  misc_feature (709)..(709): Absent or Glu or Thr or Ser or Lys or Ile or Ala or Leu or Gly or Val or Asp or Asn
  misc_feature (710)..(710): Absent or Gly or Asp or Lys or Glu or Ser or Asn or Ala or Pro or His
  misc_feature (711)..(711): Absent or Gln or Thr or Ile or Gly or Lys or Asn or Asp or Ser or Arg or His or Tyr or Leu
  misc_feature (712)..(712): Absent or Asn or Phe or Tyr or His or Pro or Gly
  misc_feature (713)..(713): Absent or Glu or His or Cys or Asp or Ala or Thr or Asn or Gly or Leu
  misc_feature (714)..(714): Absent or His or Arg or Val or Ile or Gly or Pro
  misc_feature (715)..(715): Absent or His or Gly or Lys or Leu or Ala or Tyr
  misc_feature (716)..(716): Absent or Lys or Met or Gln or Cys or Arg or Leu or Ile or Gly or Thr or Ala
  misc_feature (717)..(717): Absent or Ile or Val or Ala or Cys or Gly or Arg or Glu or Thr or Leu
  misc_feature (718)..(718): Absent or Glu or Thr or Asn or Val or Pro or Leu
  misc_feature (719)..(719): Absent or Gly or Ala or Ser or Ile or Asp or Asn
  misc_feature (720)..(720): Absent or Ile or Cys or Leu or Asp or Ala or Gly or Val
  misc_feature (721)..(721): Absent or Phe or Met or Glu or Asp or Asn or Thr
  misc_feature (722)..(722): Absent or Lys or Pro or His or Glu or Gly or Asp
  misc_feature (723)..(723): Absent or Ala or Val or Ser or Leu or Gln or Glu
  misc_feature (724)..(724): Absent or Leu or Phe or Lys or Val or Asp or Glu
  misc_feature (725)..(725): Absent or Ala or Gly or Ser or Arg or Ile or Thr or Lys
  misc_feature (726)..(726): Absent or Arg or Lys or Ile or Leu or Ala or Phe
  misc_feature (727)..(727): Absent or Ala or Ser or Thr or Phe or Leu or Ile or Glu or Val
  misc_feature (728)..(728): Absent or Leu or Val or Gly or Ser or Pro
  misc_feature (729)..(729): Absent or Lys or Arg or Asn or Gly or Phe or Ala or Leu
  misc_feature (730)..(730): Absent or Met or Gln or Lys or His or Phe or Glu or Arg
  misc_feature (731)..(731): Absent or Ala or Cys or Ile or Val or Gly or Gln or Thr or Met
  misc_feature (732)..(732): Absent or Leu or Cys or Ile or Val or Phe or Glu or Ser or Arg or Gly
  misc_feature (733)..(733): Absent or Lys or Ser or Ala or Tyr or Arg or His or Thr or Pro or Met
  misc_feature (734)..(734): Absent or Arg or Lys or Gln or Ile or Val or Leu or Ser
  misc_feature (735)..(735): Absent or Asp or Met or Ile or Pro or Ser
  misc_feature (736)..(736): Absent or Ile or Asp or Glu or Gln or Thr or Ala or Leu
  misc_feature (737)..(737): Absent or Tyr or Thr or Ala or Asn or Ser or His or Gly or Asp
  misc_feature (738)..(738): Absent or His or Asn or Thr or Glu or Asp or Leu or Gly
  misc_feature (739)..(739): Absent or Phe or Asn or Gln or Val or Leu or Ala or Ile
  misc_feature (740)..(740): Absent or Glu or Tyr or Val or Gln or Asn or Thr or Met or Ala or Asp or Cys or Leu or Arg
  misc_feature (741)..(741): Absent or Leu or Thr or Ile or Met or Gly or Arg
  misc_feature (742)..(742): Absent or Pro or Ala or Cys or Leu or Gly
  misc_feature (743)..(743): Absent or Ser or Thr or His or Arg or Asp or Ala or Pro or Gly
  misc_feature (744)..(744): Absent or Ser or Thr or Tyr or Ile or Gly or Glu
  misc_feature (745)..(745): Absent or Lys or Thr or Ile or Glu or Val
  misc_feature (746)..(746): Absent or Gly or Asp or Phe or Glu or Ser
  misc_feature (747)..(747): Absent or Val or Met or Cys or Ile or Thr or Leu or Arg or His or Ser
  misc_feature (748)..(748): Absent or Leu or Ile or Val or Arg or Pro
  misc_feature (749)..(749): Absent or Leu or Ala or Tyr or Lys or Thr or Arg or Asn
  misc_feature (750)..(750): Absent or Gly or Ile or Tyr
  misc_feature (751)..(751): Absent or Tyr or Ala or Arg
  misc_feature (752)..(752): Absent or His or Asp or Ser or Ile
  misc_feature (753)..(753): Absent or Ala or Ile or Val or Ser
  misc_feature (754)..(754): Absent or Phe or Lys or Asp or Thr
  misc_feature (755)..(755): Absent or Arg or Ile or Tyr or Asn
  misc_feature (756)..(756): Absent or Arg or Tyr or Ala or Ile
  misc_feature (757)..(757): Absent or Gln or Val or Gly
  misc_feature (758)..(758): Absent or Ile or Glu or Ser or Asp
  misc_feature (759)..(759): Absent or Leu or Ile or Ser
  misc_feature (760)..(760): Absent or Asp or Gly or Asn or Leu or His
  misc_feature (761)..(761): Absent or Ser or Glu or Asp or Ile
  misc_feature (762)..(762): Absent or Leu or Thr or Val or Glu
  misc_feature (763)..(763): Absent or Cys or Met or Arg or Phe
  misc_feature (764)..(764): Absent or Leu or Arg
  misc_feature (765)..(765): Absent or Arg or Lys
  misc_feature (766)..(766): Absent or Ser or Lys or Pro or Thr
  misc_feature (767)..(767): Absent or Asp or Arg or Gly
  misc_feature (768)..(768): Absent or Gly or Phe or Glu or Asp
  misc_feature (769)..(769): Absent or Phe or Asp or Asn
  misc_feature (770)..(770): Absent or Glu or Asp or Leu or Val
  misc_feature (771)..(771): Absent or Ile or Phe or Asp
  misc_feature (772)..(772): Absent or Asp or Tyr or Glu or Lys
  misc_feature (773)..(773): Absent or Thr or Met or Asp or Ala
  misc_feature (774)..(774): Absent or Glu or Phe or Gln or Lys
  misc_feature (775)..(775): Absent or Met or Lys or Pro or Thr
  misc_feature (776)..(776): Absent or Tyr or Gly or Glu
  misc_feature (777)..(777): Absent or Ile or Leu or Pro
  misc_feature (778)..(778): Absent or Arg or Thr or Glu or Leu
  misc_feature (779)..(779): Absent or Ala or Glu or Arg
  misc_feature (780)..(780): Absent or Ala or Thr or Glu or Phe
  misc_feature (781)..(781): Absent or Arg or Glu or Leu or Val
  misc_feature (782)..(782): Absent or Ile or Lys or Ala or Asp or Asn
  misc_feature (783)..(783): Absent or Gly or Lys or Ile
  misc_feature (784)..(784): Absent or Leu or Lys or Ala or Glu
  misc_feature (785)..(785): Absent or Lys or Leu or Ala or Asn
  misc_feature (786)..(786): Absent or Val or Tyr or Ala or Thr
  misc_feature (787)..(787): Absent or Lys or Val or Ala or Phe
  misc_feature (788)..(788): Absent or Glu or Lys or Gly or Val
  misc_feature (789)..(789): Absent or Val or Arg or His or Cys
  misc_feature (790)..(790): Absent or Pro or Gln or Ala or Gly
  misc_feature (791)..(791): Absent or Ser or Asp or Leu
  misc_feature (792)..(792): Absent or Tyr or Asp or Pro
  misc_feature (793)..(793): Absent or Glu or Asp or Lys
  misc_feature (794)..(794): Absent or Ala or Ile or Gly or Tyr
  misc_feature (795)..(795): Absent or Arg or Lys or Pro or Asp or Leu
  misc_feature (796)..(796): Absent or Arg or Ile or Asp or Gly or Ala
  misc_feature (797)..(797): Absent or Leu or Val or Gly or Lys
  misc_feature (798)..(798): Absent or Ala or Glu or Ile or Arg or Leu
  misc_feature (799)..(799): Absent or Gly or Gln or Leu or Asp
  misc_feature (800)..(800): Absent or Thr or Ala or Val
  misc_feature (801)..(801): Absent or Gly or Lys or Val or Asn
  misc_feature (802)..(802): Absent or Lys or Asn or Leu
  misc_feature (803)..(803): Absent or Leu or Tyr or Pro or Val or Ile
  misc_feature (804)..(804): Absent or Arg or Ala or Gly
  misc_feature (805)..(805): Absent or Ser or Asp or Glu or Phe
  misc_feature (806)..(806): Absent or Phe or Tyr or Leu or Asn
  misc_feature (807)..(807): Absent or His or Ile or Pro or Glu or Asn
  misc_feature (808)..(808): Absent or Asp or Ile or Ser or Asn
  misc_feature (809)..(809): Absent or Gly or Pro or Asp or Asn
  misc_feature (810)..(810): Absent or Ala or Met or Val or Thr
  misc_feature (811)..(811): Absent or Arg or Glu or Tyr
  misc_feature (812)..(812): Absent or Ile or Lys or Ala
  misc_feature (813)..(813): Absent or Leu or Ile
  misc_feature (814)..(814): Absent or Arg or Leu or Glu
  misc_feature (815)..(815): Absent or Thr or Pro or Ser
  misc_feature (816)..(816): Absent or Ile or Asp or Tyr
  misc_feature (817)..(817): Absent or Leu or Gly or Glu or Lys
  misc_feature (818)..(818): Absent or Arg or Pro or Phe
  misc_feature (819)..(819): Absent or Glu or Phe or Ser
  misc_feature (820)..(820): Absent or Asn or Ser or Ala or Asp
  misc_feature (821)..(821): Absent or Phe or Val or Leu or Lys
  misc_feature (822)..(822): Absent or His or Asn or Val or Gly
  misc_feature (823)..(823): Absent or Gly or His or Ser
  misc_feature (824)..(824): Absent or Pro or Lys
  misc_feature (825)..(825): Absent or Gly or Phe
  misc_feature (826)..(826): Absent or Ala or Ile or Val
  misc_feature (827)..(827): Absent or Ala or Leu
  misc_feature (828)..(828): Absent or Val or Asp
  misc_feature (829)..(829): Absent or Gly
  misc_feature (830)..(830): Absent or Ala or Lys
  misc_feature (831)..(831): Absent or Arg or Glu
  misc_feature (832)..(832): Absent or Ala or Tyr
  misc_feature (833)..(833): Absent or Tyr or Glu
  misc_feature (834)..(834): Absent or Pro or Met
  misc_feature (835)..(835): Absent or Ala or Ser
  misc_feature (836)..(836): Absent or Asp or Leu
  misc_feature (837)..(837): Absent or Gln or Leu
  misc_feature (838)..(838): Absent or His or Gly
  misc_feature (839)..(839): Absent or Arg or Lys
  misc_feature (840)..(840): Absent or Asp or His
  misc_feature (841)..(841): Absent or Ala or Asn
  misc_feature (842)..(842): Absent or Val or Ile
  misc_feature (843)..(843): Absent or Ala or Ser
  misc_feature (844)..(844): Absent or Leu or Asn
  misc_feature (845)..(845): Absent or Leu or Thr
  misc_feature (846)..(846): Absent or Ala
  misc_feature (847)..(847): Absent or Ala or Ile
  misc_feature (848)..(848): Absent or Arg or Ala
  misc_feature (849)..(849): Absent or Gly or Ile
  misc_feature (850)..(850): Absent or Ile or Glu
  misc_feature (851)..(851): Absent or Pro or Leu
  misc_feature (852)..(852): Absent or Val or Ala
  misc_feature (853)..(853): Absent or Val or Lys
  misc_feature (854)..(854): Absent or Val or Lys
  misc_feature (855)..(855): Absent or Thr or Ile
  misc_feature (856)..(856): Absent or Gly
  misc_feature (857)..(857): Absent or Gly or Leu
  misc_feature (858)..(858): Absent or Pro or Thr
  misc_feature (859)..(859): Absent or Asp
  misc_feature (860)..(860): Absent or Glu
  misc_feature (861)..(861): Absent or Arg or Glu
  misc_feature (862)..(862): Absent or Asp or Ile
  misc_feature (863)..(863): Absent or Leu or Gln or Glu
  misc_feature (864)..(864): Absent or Thr or Lys or Asn
  misc_feature (865)..(865): Absent or Ala or Gly
  misc_feature (866)..(866): Absent or His or Leu
  misc_feature (867)..(867): Absent or Val or Lys
  misc_feature (868)..(868): Absent or Ala or Glu
  misc_feature (869)..(869): Absent or Gly or Ile
  misc_feature (870)..(870): Absent or Ser or Lys
  misc_feature (871)..(871): Absent or Ile
  misc_feature (872)..(872): Absent or Ala or Ser
  misc_feature (873)..(873): Absent or Leu or Asn
  misc_feature (874)..(874): Absent or Asp or Met
  misc_feature (875)..(875): Absent or Leu or Arg
  misc_feature (876)..(876): Absent or Gly or Phe
  misc_feature (877)..(877): Absent or Gly or Gln
  misc_feature (878)..(878): Absent or Arg or Glu
  misc_feature (879)..(879): Absent or Thr or Ile
  misc_feature (880)..(880): Absent or Asp or Lys
  misc_feature (881)..(881): Absent or Leu or Ile
  misc_feature (882)..(882): Absent or Ala or Gly
  misc_feature (883)..(883): Absent or Gly or Asn or Glu
  misc_feature (884)..(884): Absent or Leu or Asp
  misc_feature (885)..(885): Absent or Gly or Ile
  misc_feature (886)..(886): Absent or Ala or Tyr
  misc_feature (887)..(887): Absent or Leu or Ile
  misc_feature (888)..(888): Absent or Met or Asn
  misc_feature (889)..(889): Absent or Arg or Asp
  misc_feature (890)..(890): Absent or Arg or Ala
  misc_feature (891)..(891): Absent or Ala or Tyr
  misc_feature (892)..(892): Absent or Ala or Asn
  misc_feature (893)..(893): Absent or Val or Ala
  misc_feature (894)..(894): Absent or Leu or Ser
  misc_feature (895)..(895): Absent or Val or Pro
  misc_feature (896)..(896): Absent or Ser or Met
  misc_feature (897)..(897): Absent or Gly or Ser
  misc_feature (898)..(898): Absent or Asn or Met
  misc_feature (899)..(899): Absent or Thr or Lys
  misc_feature (900)..(900): Absent or Gly or Ala
  misc_feature (901)..(901): Absent or Pro or Ala
  misc_feature (902)..(902): Absent or Ala or Ile
  misc_feature (903)..(903): Absent or His or Asp
  misc_feature (904)..(904): Absent or Leu or Thr
  misc_feature (905)..(905): Absent or Ala or Leu
  misc_feature (906)..(906): Absent or Ala or Asn
  misc_feature (907)..(907): Absent or Ala or Glu
  misc_feature (908)..(908): Absent or Val or Ile
  misc_feature (909)..(909): Absent or Gly or Tyr
  misc_feature (910)..(910): Absent or Leu or Asn
  misc_feature (911)..(911): Absent or Pro or Asp
  misc_feature (912)..(912): Absent or Val or Lys
  misc_feature (913)..(913): Absent or Val or Tyr
  misc_feature (914)..(914): Absent or Ser or Lys
  misc_feature (915)..(915): Absent or Leu or Ile or Val
  misc_feature (916)..(916): Absent or Phe or Ala
  misc_feature (917)..(917): Absent or Ser or Ile
  misc_feature (918)..(918): Absent or Pro or Leu
  misc_feature (919)..(919): Absent or Val or Gly
  misc_feature (920)..(920): Absent or Val or Asp
  misc_feature (921)..(921): Absent or Pro or Met
  misc_feature (922)..(922): Absent or Pro or Leu
  misc_feature (923)..(923): Absent or Ile or Glu
  misc_feature (924)..(924): Absent or Arg or Leu
  misc_feature (925)..(925): Absent or Trp or Gly
  misc_feature (926)..(926): Absent or Ala or Glu or Asp
  misc_feature (927)..(927): Absent or Pro or Asn
  misc_feature (928)..(928): Absent or Tyr or Glu
  misc_feature (929)..(929): Absent or Arg or Val or Ile
  misc_feature (930)..(930): Absent or Val or Asp
  misc_feature (931)..(931): Absent or Pro or Tyr
  misc_feature (932)..(932): Absent or Val or His
  misc_feature (933)..(933): Absent or Ile or Met
  misc_feature (934)..(934): Absent or Leu or Asp
  misc_feature (935)..(935): Absent or Leu or Val
  misc_feature (936)..(936): Absent or Gly or Leu
  misc_feature (937)..(937): Absent or Asp or Asn
  misc_feature (938)..(938): Absent or Gln or Tyr
  misc_feature (939)..(939): Absent or Asp or Leu
  misc_feature (940)..(940): Absent or Ala or Leu
  misc_feature (941)..(941): Absent or Ala or Asp
  misc_feature (942)..(942): Absent or Cys or Lys
  misc_feature (943)..(943): Absent or Lys
  misc_feature (944)..(944): Absent or Leu or Ile
  misc_feature (945)..(945): Absent or Ser or Lys
  misc_feature (946)..(946): Absent or Arg or Leu
  misc_feature (947)..(947): Absent or Ala or Ile
  misc_feature (948)..(948): Absent or Arg or Tyr
  misc_feature (949)..(949): Absent or Asp or Leu
  misc_feature (950)..(950): Absent or Cys or Tyr
  misc_feature (951)..(951): Absent or Pro or Gly
  misc_feature (952)..(952): Absent or Val or Glu
  misc_feature (953)..(953): Absent or Pro or Arg
  misc_feature (954)..(954): Absent or Gly or Met
  misc_feature (955)..(955): Absent or His or Lys
  misc_feature (956)..(956): Absent or Pro or Lys
  misc_feature (957)..(957): Absent or Cys or Ala
  misc_feature (958)..(958): Absent or Leu or Tyr
  misc_feature (959)..(959): Absent or Ala or Asp or Asn
  misc_feature (960)..(960): Absent or Gly or Ile or Met
  misc_feature (961)..(961): Absent or Val or Phe
  misc_feature (962)..(962): Absent or Ala or Met
  misc_feature (963)..(963): Absent or Pro or Lys
  misc_feature (964)..(964): Absent or Ala or Asn or Ser
  misc_feature (965)..(965): Absent or Glu or Lys
  misc_feature (966)..(966): Absent or Val or Ser
  misc_feature (967)..(967): Absent or Ala or Glu
  misc_feature (968)..(968): Absent or Asp or Glu
  misc_feature (969)..(969): Absent or Ala or Tyr
  misc_feature (970)..(970): Absent or Val or Arg
  misc_feature (971)..(971): Absent or Val or Phe
  misc_feature (972)..(972): Absent or Arg or Trp
  misc_feature (973)..(973): Absent or Leu or Tyr
  misc_feature (974)..(974): Absent or Met or Tyr
  misc_feature (975)..(975): Absent or Ala or Pro
  misc_feature (976)..(976): Absent or Thr
  misc_feature (977)..(977): Absent or Ser or Lys
  misc_feature (978)..(978): Absent or Arg or Glu
  misc_feature (979)..(979): Absent or Ala or Gly
  misc_feature (980)..(980): Absent or Glu or Ile
  misc_feature (981)..(981): Absent or Val
  misc_feature (982)..(982): Absent or Pro or Glu
  misc_feature (983)..(983): Absent or Ala or Ser
  misc_feature (984)..(984): Absent or Leu
  misc_feature (985)..(985): Absent or Lys
  misc_feature (986)..(986): Absent or Asn
  misc_feature (987)..(987): Absent or Ile
  misc_feature (988)..(988): Absent or Lys
  misc_feature (989)..(989): Absent or Met
  misc_feature (990)..(990): Absent or Asp or Glu
  misc_feature (991)..(991): Absent or Lys
  misc_feature (992)..(992): Absent or Val
  misc_feature (993)..(993): Absent or Ile
  misc_feature (994)..(994): Absent or Leu
  misc_feature (995)..(995): Absent or Leu
  misc_feature (996)..(996): Absent or Lys
  misc_feature (997)..(997): Absent or Ala
  misc_feature (998)..(998): Absent or Ser
  misc_feature (999)..(999): Absent or Arg
  misc_feature (1000)..(1000): Absent or Gly
  misc_feature (1001)..(1001): Absent or Ile or Thr
  misc_feature (1002)..(1002): Absent or Lys or Ala
  misc_feature (1003)..(1003): Absent or Leu
  misc_feature (1004)..(1004): Absent or Glu
  misc_feature (1005)..(1005): Absent or Glu or Asp
  misc_feature (1006)..(1006): Absent or Ile
  misc_feature (1007)..(1007): Absent or Ile
  misc_feature (1008)..(1008): Absent or Lys
  misc_feature (1009)..(1009): Absent or Leu
  misc_feature (1010)..(1010): Absent or Ser
  unsure (1)..(1010): unsure at all Xaa locations
XXXXXXXXXXXXXXXXXXXXXXXXXXXXXXXXXXXXXXXXXXXXXXXXXXXXXXXXXXXXXXXXXXXXXXXXXXXXXXXXXXXXXXXXXXXXXXXXXXXXXXXXXXXXXXXXXXXXXXXXXXXXXXXXXXXXXXXXXXXXXXXXXXXXXXXXXXXXXXXXXXXXXXXXXXXXXXXXXXXXXXXXXXXXXXXXXXXXXXXXXXXXXXXXXXXXXXXXXXXXXXXXXXXXXXXXXXXXXXXXXXXXXXXXXXXXXXXXXXXXXXXXXXXXXXXXXXXXXXXXXXXXXXXXXXXXXXXXXXXXXXXXXXXXXXXXXXXXXXXXXXXXXXXXXXXXXXXXXXXXXXXXDRDGXXXXXXXXXXXXXXXXXXXXXXXXXXXXXXXAXXXXLXXXGXXXXXXTNQXGXXXGXXXXXXXXXXXXXXXXXXXXXXXGXXXXXXXXCXXXXXXXXXXXXXXXXXXCXCRKPXXGXXXXXXXXXXXXXXXXXXXXXXXXGDXXXXDXXXXXXXXXXXXXXXXXXXXXXXXXXXXXXXXXXXXXXXXXXXXXXXXXXXXXXXXXXXXXXXXXXXXXXXXXXXXXXXXXXXXXXXXXXXXXXXXXXXXXXXXXXXXXXXXXXXXXXXXXXXXXXXXXXXXXXXXXXXXXXXXXXXXXXXXXXXXXXXXXXXXXXXXXXXXXXXXXXXXXXXXXXXXXXXXXXXXXXXXXXXXXXXXXXXXXXXXXXXXXXXXXXXXXXXXXXXXXXXXXXXXXXXXXXXXXXXXXXXXXXXXXXXXXXXXXXXXXXXXXXXXXXXXXXXXXXXXXXXXXXXXXXXXXXXXXXXXXXXXXXXXXXXXXXXXXXXXXXXXXXXXXXXXXXXXXXXXXXXXXXXXXXXXXXXXXXXXXXXXXXXXXXXXXXXXXXXXXXXXXXXXXXXXXXXXXXXXXXXXXXXXXXXXXXXXXXXXXXXXXXXXXXXXXXXXXXXXXXXXXXXXXXXXXXXXXXXXXXXXXXXXXXXXXXXXXXXXXXXXXXXXXXXXXXXXXXX

SEQ ID NO: 36464 - protein, 825 aa, Artificial sequence
  consensus sequence of seq id no: 466  and its homologs
  misc_feature (1)..(1): Absent or Met
  misc_feature (2)..(2): Absent or Ala or Leu
  misc_feature (3)..(3): Absent or Asn
  misc_feature (4)..(4): Absent or Leu or Pro
  misc_feature (5)..(5): Absent or Phe or Val
  misc_feature (6)..(6): Absent or Thr or Asn
  misc_feature (7)..(7): Absent or Ser or Asn
  misc_feature (8)..(8): Absent or His or Ser
  misc_feature (9)..(9): Absent or Ala or Thr
  misc_feature (10)..(10): Absent or Ser or Lys
  misc_feature (11)..(11): Absent or Thr or Lys
  misc_feature (12)..(12): Absent or Thr or Tyr
  misc_feature (13)..(13): Absent or Thr or Asn
  misc_feature (14)..(14): Absent or Gln or Phe
  misc_feature (15)..(15): Absent or Thr or Lys
  misc_feature (16)..(16): Absent or Ala or Cys
  misc_feature (17)..(17): Absent or Ala or Gly
  misc_feature (18)..(18): Absent or Glu or Pro
  misc_feature (19)..(19): Absent or Ile or Ser
  misc_feature (20)..(20): Absent or Met or Leu or Ser
  misc_feature (21)..(21): Absent or Thr or Lys or Ala
  misc_feature (22)..(22): Absent or Leu or Ser or Asp
  misc_feature (23)..(23): Absent or Ile or Gln or Asn
  misc_feature (24)..(24): Absent or Ser or Leu
  misc_feature (25)..(25): Absent or Ala or Gln or Asp
  misc_feature (26)..(26): Absent or Gln or Cys
  misc_feature (27)..(27): Absent or Gln or Asn or Phe
  misc_feature (28)..(28): Absent or Ala or Ser or Gln
  misc_feature (29)..(29): Absent or Leu or Thr or Asp
  misc_feature (30)..(30): Absent or Gln or Thr or Asn
  misc_feature (31)..(31): Absent or Gly or Met or Glu or Ser
  misc_feature (32)..(32): Absent or Leu or Val or Ala or Gln
  misc_feature (33)..(33): Absent or Gly or Pro or Thr or Asn
  misc_feature (34)..(34): Absent or Gly or Pro or Ser
  misc_feature (35)..(35): Absent or Ser or Thr or Leu
  misc_feature (36)..(36): Absent or Asp or Leu or Ser or Asn
  misc_feature (37)..(37): Absent or Ser or Leu or Pro or Asn
  misc_feature (38)..(38): Absent or Phe or Glu or Ser or Leu
  misc_feature (39)..(39): Absent or Gly or Glu or Phe or Leu
  misc_feature (40)..(40): Absent or Gly or Gln or Asn
  misc_feature (41)..(41): Absent or Arg or Ser or Pro
  misc_feature (42)..(42): Absent or Arg or Lys or Gln or Ala
  misc_feature (43)..(43): Absent or Ser or Leu or Thr or Asn
  misc_feature (44)..(44): Absent or Asn or Leu or Gly
  misc_feature (45)..(45): Absent or Leu or His
  misc_feature (46)..(46): Absent or Gln or Ser or Gly
  misc_feature (47)..(47): Absent or Ser or Ala or Leu or Tyr
  misc_feature (48)..(48): Absent or Leu or Ala or Phe
  misc_feature (49)..(49): Absent or Cys
  misc_feature (50)..(50): Absent or His or Arg or Phe or Ala
  misc_feature (51)..(51): Absent or Val or Cys
  misc_feature (52)..(52): Absent or Cys or Gln or Val
  misc_feature (53)..(53): Absent or Gly or Asp or Glu
  misc_feature (54)..(54): Absent or Lys or Cys
  misc_feature (55)..(55): Absent or Tyr or Arg
  misc_feature (56)..(56): Absent or His or Arg or Pro
  misc_feature (57)..(57): Absent or Gly or Leu or Phe or Ile
  misc_feature (58)..(58): Absent or Ala or Thr or Ser or Gly
  misc_feature (59)..(59): Absent or Ser or Thr or Pro or Asn
  misc_feature (60)..(60): Absent or Asp or Met
  misc_feature (61)..(61): Absent or His or Ser
  misc_feature (62)..(62): Absent or Trp or Asp or Gln or Glu or Ile
  misc_feature (63)..(63): Absent or Gln or Arg or Asp or Asn or Lys
  misc_feature (64)..(64): Absent or Phe or Ser
  misc_feature (65)..(65): Absent or Met or Leu or Thr
  misc_feature (66)..(66): Absent or Gln or Glu or Ser or Gly
  misc_feature (67)..(67): Absent or Thr or Asp
  misc_feature (68)..(68): Absent or Met or Pro
  misc_feature (69)..(69): Absent or Pro or Tyr
  misc_feature (70)..(70): Absent or Thr or Gln or Ser or Asp
  misc_feature (71)..(71): Absent or Asp or Lys
  misc_feature (72)..(72): Absent or Pro or Asp
  misc_feature (73)..(73): Absent or Leu or Val or Glu or Ala
  misc_feature (74)..(74): Absent or Asp or Glu or Ile or Ser
  misc_feature (75)..(75): Absent or Met or Leu or Ile
  misc_feature (76)..(76): Absent or Lys or Val or Met or Ile or Thr
  misc_feature (77)..(77): Absent or Lys or Asp or Ala or Ser or His or Met
  misc_feature (78)..(78): Absent or Tyr or Asp or Thr or Leu
  misc_feature (79)..(79): Absent or Ile or Leu or Phe or Val or Thr
  misc_feature (80)..(80): Absent or Glu or Val or Gln or Tyr or Ser or Asn
  misc_feature (81)..(81): Absent or Glu or Arg or Lys or Cys or Ser
  misc_feature (82)..(82): Absent or Val or Met or Asn or Ala
  misc_feature (83)..(83): Absent or Pro or Gly or Cys or Leu
  misc_feature (84)..(84): Absent or Thr or Leu or Ile or Lys or Phe
  misc_feature (85)..(85): Absent or Gly or Tyr or Phe or Ile or Ser
  misc_feature (86)..(86): Absent or Pro or Lys or Cys or Thr
  misc_feature (87)..(87): Absent or Arg or Asp or Glu or Pro or Ala or Asn or Met or Cys
  misc_feature (88)..(88): Absent or Ala or Gln or Asn or Glu or Asp or Ser or Met
  misc_feature (89)..(89): Absent or Leu or Gln or Ser or Ala or Met or Val or Glu or Thr or Phe
  misc_feature (90)..(90): Absent or Val or Leu or Ile or Tyr or Ser or Asn or Lys
  misc_feature (91)..(91): Absent or His or Asn or Arg or Ala or Glu or Thr or Ile or Ser or Met
  misc_feature (92)..(92): Absent or Val or Ala or Ile or Arg or Phe or Leu
  misc_feature (93)..(93): Absent or Asp or Ala or Phe or Arg or Gly
  misc_feature (94)..(94): Absent or Gly or Met or Asp or Glu or Asn or Gln or Arg
  misc_feature (95)..(95): Absent or Cys or Lys or Gly or Arg or Ala or Pro or Val
  misc_feature (96)..(96): Absent or Ser or Gln or Leu or Val or Ile or Tyr or Phe or Thr or Pro
  misc_feature (97)..(97): Absent or Cys or Tyr or Asn or Thr or Ser or Asp or Gly
  misc_feature (98)..(98): Absent or Gly or Cys or Thr or Ala or Ser or Pro or Asp or Phe
  misc_feature (99)..(99): Absent or Thr or Asn or Tyr or Ser or Ala or Asp or Glu or Lys or Cys
  misc_feature (100)..(100): Absent or Cys or Glu or Arg or Ser or Gln or Leu
  misc_feature (101)..(101): Absent or Gly or Asp or Leu or Met or Pro or Arg or Asn or Glu
  misc_feature (102)..(102): Absent or Gln or Arg or Leu or Val or Thr or Ser
  misc_feature (103)..(103): Absent or Ala or Lys or Gln or Glu or Asp or Met or His or Arg or Asn
  misc_feature (104)..(104): Absent or Arg or Ala or Thr or Ile or Leu or Ser
  misc_feature (105)..(105): Absent or Ser or Leu or Ala or Thr or Met or Val
  misc_feature (106)..(106): Absent or Ile or Leu or Phe or Arg or Gly or Glu or Pro
  misc_feature (107)..(107): Absent or Asp or Leu or Phe or Tyr or Cys or Pro or Lys
  misc_feature (108)..(108): Absent or Pro or Lys or Ala or Ser or Ile or Asp or Gln
  misc_feature (109)..(109): Absent or Arg or Ser or Asn or Cys or Ala or Ile
  misc_feature (110)..(110): Absent or Leu or Ala or Ile or Gly or Glu or Thr
  misc_feature (111)..(111): Absent or Gln or Gly or Ser or Glu or Leu or Thr
  misc_feature (112)..(112): Absent or Gln or Lys or Arg or Asn or Asp or His or Ser or Met
  misc_feature (113)..(113): Absent or Leu or Gly or Ser or His or Ala or Gln or Arg or Glu
  misc_feature (114)..(114): Absent or Lys or Ser or Asp or Ala or Thr or Met or Val
  misc_feature (115)..(115): Absent or Pro or Leu or Glu or Ala or Val or Ser or Arg or Met or Asn
  misc_feature (116)..(116): Absent or Asp or Lys or Glu or Ala or Tyr or Gly or Ser or Pro or Val or Phe or Asn
  misc_feature (117)..(117): Absent or Asn or Arg or Gln or Lys or Glu or Cys or Ser or Val or Met or Trp or Gly
  misc_feature (118)..(118): Absent or Pro or Glu or His or Ala or Met or Val or Leu or Ser
  misc_feature (119)..(119): Absent or Asp or Lys or Ala or Glu or Cys or Ser or Thr or Val or Pro
  misc_feature (120)..(120): Absent or Ile or Leu or Met or Ala or Gln or His or Thr or Asp or Asn or Arg or Lys or Cys or Ser
  misc_feature (121)..(121): Absent or Ala or Val or Ile or Leu or Glu or Arg or Lys or Ser or Gln or Gly or Pro
  misc_feature (122)..(122): Absent or Asp or Leu or Arg or Ala or Gln or Thr or Met or Cys or Glu or Ser or Lys or Val or Gly
  misc_feature (123)..(123): Absent or Gly or Ala or Glu or Arg or Ser or Cys or Tyr or Thr or Met or His or Ile or Val or Leu or Phe
  misc_feature (124)..(124): Absent or Met or Leu or Ala or Thr or Ser or Asp or Pro or Lys or Gln or Arg
  misc_feature (125)..(125): Absent or Glu or Ala or Cys or Met or Leu or Pro or Ser or Asn or Gln or Ile or Arg or Lys or Thr or Val
  misc_feature (126)..(126): Absent or Asp or Ser or Gln or Lys or Ala or Glu or Leu or Arg or Thr or Pro or Val or Cys or Met or Ile
  misc_feature (127)..(127): Absent or Pro or Ser or Gln or Glu or Cys or Ala or Asp or Leu or Met or Lys or Gly
  misc_feature (128)..(128): Absent or His or Glu or Ala or Ser or Asp or Met or Thr or Pro or Arg or Cys
  misc_feature (129)..(129): Absent or Leu or Gly or Ala or Pro or Asn or Glu or Ser or Lys or Arg or Val
  misc_feature (130)..(130): Absent or Ala or Asp or Gly or Val or Gln or Leu or Glu or Ser or Phe or Asn or Met or Pro or Arg
  misc_feature (131)..(131): Absent or Leu or Tyr or Ile or Met or Thr or Val or Pro or Phe or Ser or Asp or Asn or Arg or Gln
  misc_feature (132)..(132): Absent or Asn or Gln or Glu or Asp or Ala or Lys or Ser or His or Arg or Met or Leu or Thr or Phe
  misc_feature (133)..(133): Absent or Tyr or Phe or Asn or Gln or Ser or Gly or Thr or Pro or Ile or Arg or Lys or Leu
  misc_feature (134)..(134): Absent or Asp or Asn or Met or Ala or Glu or Gln or Ser or Val or Ile or Leu or Phe or Thr or Gly or Arg
  misc_feature (135)..(135): Absent or Pro or Ile or Cys or Phe or Met or Gln or Glu or Asp or Asn or Ser or Thr or Ala or Lys or Trp or Leu
  misc_feature (136)..(136): Absent or Met or Leu or Ala or His or Arg or Glu or Lys or Asp or Gly or Ser or Val or Asn
  misc_feature (137)..(137): Absent or Asn or Phe or Lys or Pro or Cys or Asp or Ala or Leu or Arg or Met or Tyr or Thr or Gly or Trp or Glu or His or Ile
  misc_feature (138)..(138): Absent or Met or Pro or Ser or Gln or Asp or Ala or Phe or Tyr or Leu or Lys or Arg or Gly or Asn or Val
  misc_feature (139)..(139): Absent or Ile or Met or Asp or Phe or Leu or Cys or Pro or His or Glu or Arg or Ser or Ala or Gln or Val or Thr or Lys or Trp or Tyr
  misc_feature (140)..(140): Absent or Asn or Met or His or Val or Cys or Pro or Thr or Gly or Ser or Arg or Phe or Lys or Leu or Ile or Ala or Asp
  misc_feature (141)..(141): Absent or Met or Val or Arg or Lys or Leu or Gln or His or Ser or Pro or Phe or Ala or Ile or Asp or Gly or Asn or Glu or Thr
  misc_feature (142)..(142): Absent or Lys or Glu or Ala or Arg or Gly or Ser or Asn or Thr or Cys or Met or Gln or Val or Ile or Tyr or Pro or His or Asp or Leu or Phe
  misc_feature (143)..(143): Absent or Arg or Lys or Ser or Gln or Asp or Thr or Gly or Ala or Cys or Glu or Met or Pro or Leu or Phe or Asn or Val or His
  misc_feature (144)..(144): Absent or Lys or Val or Thr or Ser or Pro or Phe or Gly or Leu or Arg or Met or His or Ala or Asn or Glu or Gln or Asp or Trp
  misc_feature (145)..(145): Met or Ala or Val or Lys or Absent or Ile or Gln or Leu or Ser or Thr or Arg or Glu or Asn or Gly or Pro or Phe or His or Asp or Trp or Cys
  misc_feature (146)..(146): Asn or Ala or Ser or Absent or Leu or Gly or Lys or Thr or Pro or Met or Phe or Val or Ile or Arg or Gln or Cys or Glu
  misc_feature (147)..(147): Arg or Ile or Leu or Ala or Absent or Met or Thr or Phe or Val or Gln or Ser or Trp or Gly or Asp or Pro or His or Lys
  misc_feature (148)..(148): Thr or Phe or Gly or Glu or Lys or Absent or Leu or Gln or Arg or Asn or Asp or Ala or Ser or Val or Cys or Pro or Met or Ile
  misc_feature (149)..(149): Arg or Ile or Absent or Ala or Ser or Asp or Glu or Thr or Gln or Asn or Gly or His or Leu or Val or Lys or Met or Phe or Pro
  misc_feature (150)..(150): Leu or Val or Absent or Arg or Gln or Gly or Met or Phe or Trp or Ile or Thr or Ser or Ala or Asp or Asn or Lys or Pro
  misc_feature (151)..(151): Leu or Ile or Met or Gln or Val or Absent or His or Arg or Phe or Ser or Gly or Glu or Ala or Thr or Lys or Pro or Asp or Cys
  misc_feature (152)..(152): Leu or Val or Ala or Lys or Absent or Arg or Cys or Thr or Ser or Pro or Gly or Asp or Phe or Met or Glu or Trp or Ile or Gln
  misc_feature (153)..(153): Leu or Ala or Val or Ile or Met or Absent or Arg or Gly or Thr or Ser or His or Gln or Phe or Tyr or Cys or Asn
  misc_feature (154)..(154): Ala or Ile or Val or Thr or Absent or Cys or Ser or Gly or Gln or Glu or Asn or Phe or Lys or Arg or His or Met or Leu or Tyr
  misc_feature (155)..(155): Ala or Ile or Leu or Val or Ser or Gly or Absent or Gln or Pro or Asp or Tyr or Lys or Thr or Arg or Phe
  misc_feature (156)..(156): Leu or Gly or Val or Ile or Ala or Thr or Absent or Met or Gln or Phe or Ser or Cys or Arg or Lys or Tyr
  misc_feature (157)..(157): Thr or Ser or Gly or Ile or Leu or Phe or Met or Ala or Asp or Absent or Val or Trp or Lys
  misc_feature (158)..(158): Leu or Ala or Ser or Val or Thr or Gly or Absent or Arg or Phe or Lys
  misc_feature (159)..(159): Ser or Ala or Leu or Thr or Pro or Met or Absent or Gly or Arg or Lys or Asn or Asp or Ile or Val or Phe
  misc_feature (160)..(160): Ser or Gly or Met or Leu or Ala or Absent or Thr or Arg or Glu or Val or Asn or Trp or Ile
  misc_feature (161)..(161): Absent or Tyr or Cys or Leu or Ala or Thr or Phe or Ser or Trp or Glu or Ile or Gly or Val or Pro
  misc_feature (162)..(162): Absent or Tyr or Val or Thr or Ala or Pro or Phe or Met or Leu or Ile or Gly or Ser or Lys or Cys
  misc_feature (163)..(163): Absent or Tyr or Leu or Phe or Asp or Glu or Cys or Ala or Gly or Ile or Gln or Arg or Lys or Ser or Val or Met
  misc_feature (164)..(164): Absent or Tyr or Ser or Ala or Asn or Asp or Leu or Cys or Arg or Gly or Val or Thr or Met or Gln or Glu or Phe or Pro
  misc_feature (165)..(165): Absent or Thr or Ala or Pro or Glu or Lys or Phe or Met or Leu or Gly or Val or Tyr or Ser
  misc_feature (166)..(166): Absent or Thr or Met or Asp or Ala or Arg or Gly or Val or Leu or Phe or Pro
  misc_feature (167)..(167): Absent or Thr or Pro or Asp or Glu or Val or Arg or Trp or Ser or Ala or Cys or Gly or Ile or His or Met
  misc_feature (168)..(168): Absent or Ser or Val or Leu or Gly or Asn or Ala or Arg or Cys
  misc_feature (169)..(169): Absent or Asn or Gln or Ala or Ser or Gly or Met or Thr or Val or Cys or Leu
  misc_feature (170)..(170): Absent or Thr or Ser or Ala or Phe or Leu or Arg or Glu
  misc_feature (171)..(171): Absent or Cys or Glu or Ala or Leu or Phe or Met or Arg or Asn or Thr or Ser or Asp
  misc_feature (172)..(172): Absent or Lys or Gly or Ala or Val or Ile or Ser or Pro or Arg or Asn or Thr or Leu or Met
  misc_feature (173)..(173): Absent or Ser or Ala or Thr or Ile or Val or Asp or Pro or Arg or Asn or Gly or Glu
  misc_feature (174)..(174): Absent or Glu or Met or Leu or Ile or Val or Ala or Ser or Thr or Gln or Lys or Gly
  misc_feature (175)..(175): Absent or Thr or Gly or Ser or Ala or Pro or Val or Asn or Phe or Lys or Met or Ile or Leu or Gln
  misc_feature (176)..(176): Absent or Pro or Asn or Ser or Cys or Thr or Arg or Ala or Leu or Met or Gln or Val or Gly or Lys
  misc_feature (177)..(177): Absent or Ala or Cys or Ser or Gly or Leu or Thr or Gln or Glu or Val or His or Met or Asp or Arg or Asn
  misc_feature (178)..(178): Absent or Thr or Ala or Gly or Asn or Lys or Ser or Pro or Val or Met or Ile or Leu or Cys or Glu
  misc_feature (179)..(179): Absent or Ser or Lys or Thr or Gly or Leu or Asp or Pro or Ala or Val or Met or Ile or Cys or Asn or Phe
  misc_feature (180)..(180): Absent or Ser or Pro or Ile or Arg or Val or Phe or Gly or Ala or Thr or Glu or Leu or Lys or Asp or Gln or Asn
  misc_feature (181)..(181): Absent or Cys or Ala or Val or Leu or Thr or Glu or Gln or Gly or Ser or Pro or Asp or Met or Arg or Asn or His or Ile
  misc_feature (182)..(182): Absent or Ser or Ala or Phe or Leu or Asp or Gln or Asn or Val or Met or Gly or Lys or Thr or His or Arg
  misc_feature (183)..(183): Absent or Asn or Gly or Leu or Pro or Thr or Ala or Asp or Lys or Phe or Ile or Arg or Ser or Val or Gln
  misc_feature (184)..(184): Absent or Gly or Leu or Ala or Asp or Thr or Gln or Pro or Asn or Cys or Ser or Lys or Arg or Met or Ile
  misc_feature (185)..(185): Absent or Asp or Phe or Leu or Ser or Gly or Pro or Gln or Thr or Met or Ala or Lys or Ile or Asn or Arg or Glu or Tyr
  misc_feature (186)..(186): Ala or Arg or Absent or Pro or Leu or Gly or Val or Asp or Lys or Gln or Asn or His or Ser or Thr
  misc_feature (187)..(187): Thr or Ala or Absent or Gln or Ser or Gly or Pro or Asp or Lys or Glu or Leu or Trp or Ile or Phe or Met or Val
  misc_feature (188)..(188): Val or Ala or Absent or Gln or Asp or Gly or Ser or Leu or Arg or Asn or Pro or His or Glu or Lys or Trp or Tyr
  misc_feature (189)..(189): Gln or Gly or Absent or Lys or Ala or Val or Leu or Asp or Tyr or Ile or Thr or Ser or Asn or Pro or Cys or Phe
  misc_feature (190)..(190): Asn or Thr or Absent or Arg or Phe or Val or Ala or Ser or Gly or Asp or Glu or Pro or Gln or Lys or Met or Ile
  misc_feature (191)..(191): Ala or Absent or Pro or Arg or His or Thr or Met or Ser or Gly or Asp or Val or Gln or Glu or Leu or Ile or Tyr or Lys or Asn
  misc_feature (192)..(192): Gly or Asn or Absent or Thr or Ser or Ala or Leu or Glu or His or Phe or Val or Met or Pro or Gln or Asp or Tyr or Trp
  misc_feature (193)..(193): Ala or Asn or Absent or Gly or Gln or Thr or Ser or Pro or Asp or Lys or Leu or Glu or Ile or Val or Met or Arg or Trp or Tyr
  misc_feature (194)..(194): Gln or Gly or Absent or Arg or Met or Leu or Ala or Ser or Val or Thr or Ile or Asp or Glu or Pro or Tyr
  misc_feature (195)..(195): Asn or Thr or Absent or Arg or Gly or Phe or Pro or His or Asp or Ser or Ala or Glu or Tyr or Gln or Ile or Val or Lys
  misc_feature (196)..(196): Thr or Asn or Absent or Val or Met or Ser or Asp or Ala or Ile or Arg or Gly or Leu or Pro or Phe or Glu or Tyr or His
  misc_feature (197)..(197): Gly or Ala or Absent or Glu or Thr or Arg or Ser or Asn or Asp or Gln or Met or Pro or Leu or Val
  misc_feature (198)..(198): Ala or Asn or Absent or Gly or Lys or Pro or Val or Thr or Glu or Gln or Ser or Asp or Met or Arg or Tyr or Trp or Phe
  misc_feature (199)..(199): Gln or Thr or Absent or Arg or Pro or Ala or Asp or Asn or Glu or Leu or Val or Ile or Met or His
  misc_feature (200)..(200): Ser or Glu or Absent or Asp or Thr or Ala or Arg or Phe or Asn or Pro or Ile
  misc_feature (201)..(201): Ala or Val or Absent or Ile or Leu or Pro or Asp or Ser or Thr or Gly or Asn or Lys or Tyr or Arg or Met or Gln
  misc_feature (202)..(202): Ser or Lys or Absent or Thr or Arg or Pro or Glu or Gly or Gln or Ala or Asp or Asn or Met or Leu
  misc_feature (203)..(203): Thr or Val or Glu or Ser or Absent or Gln or Pro or Ala or Asp or Asn or Lys or Tyr or Gly or His or Arg
  misc_feature (204)..(204): Val or Leu or Ile or Absent or Ala or Met
  misc_feature (205)..(205): Arg or Lys or His or Asn or Leu or Gln or Absent or Thr or Val or Ile or Asp or Ala
  misc_feature (206)..(206): Leu or Ile or Phe or Val or Absent or Cys or Ala
  misc_feature (208)..(208): Tyr or Gly or Absent or Phe or Ile
  misc_feature (209)..(209): Phe or Leu or Gln or Absent or Val or Ile or Met
  misc_feature (210)..(210): Pro or Absent or Ala or Gly or Ser or Lys
  misc_feature (211)..(211): Asn or Ile or Ser or Val or Leu or Absent or Asp or Gln or Cys
  misc_feature (212)..(212): Leu or Thr or Asp or Absent or Ala or Asn or Phe or Val or Ser or Met or Ile
  misc_feature (213)..(213): Thr or His or Cys or Asp or Absent or Gly or Glu or Ala
  misc_feature (214)..(214): His or Ala or Ser or Gln or Asn or Absent or Cys or Ile or Met
  misc_feature (215)..(215): Ala or Leu or Ile or Ser or Absent or Thr or Gly or Cys
  misc_feature (216)..(216): Pro or Ala or Ser or Thr or Leu or Absent or Val or Ile
  misc_feature (217)..(217): Ala or Leu or His or Tyr or Met or Absent or Ile or Trp or Val or Pro
  misc_feature (218)..(218): Leu or Tyr or Phe or Met or Pro or Ile or Absent or Ala or Val
  misc_feature (219)..(219): Val or Thr or Ala or Leu or Tyr or Ile or Absent or Met or Trp
  misc_feature (221)..(221): Leu or Asn or Met or Phe or Tyr or Cys or Asp or Glu or His or Absent or Ala or Lys or Gln or Arg or Ser or Val
  misc_feature (222)..(222): Glu or Ala or Val or Tyr or Arg or Gly or Ser or Absent or Asn or Pro or Thr or Asp or His or Leu or Gln or Lys
  misc_feature (223)..(223): Arg or Leu or Lys or Asn or Ala or Tyr or Glu or Met or Gln or Absent or His
  misc_feature (225)..(225): Thr or Asn or Met or Trp or Ala or Phe or Leu or Absent or Tyr or Ile
  misc_feature (226)..(226): Phe or Glu or Trp or Ala or Gln or Lys or Tyr or Val or Absent or Asp or Gly or Cys
  misc_feature (227)..(227): Gln or Asn or Glu or Ala or Ser or Lys or Arg or Pro or Absent or Asp or Thr or His
  misc_feature (228)..(228): Lys or Phe or Glu or Ser or Asn or Absent or Asp or Pro or Ala or Gln or Arg
  misc_feature (229)..(229): Absent or Lys or Glu or Asp or Ala or Gln or Gly or Trp or Ser
  misc_feature (230)..(230): Absent or Asn or Gly or Leu or Lys
  misc_feature (231)..(231): Absent or Lys or Asn or Ala or Gly
  misc_feature (232)..(232): Ala or Absent or Arg or Pro or Gly
  misc_feature (233)..(233): Leu or Absent or Phe or Tyr or Gly or His or Asn or Glu or Ala or Arg or Met or Gln
  misc_feature (235)..(235): Lys or Absent or Ile or Ala or Leu or Val or Phe or Met
  misc_feature (236)..(236): Thr or Phe or Ile or Glu or Met or Lys or Ser or Ala or Gln or Absent or Asn or Asp or His or Pro or Tyr
  misc_feature (237)..(237): Arg or Lys or Ser or Glu or Ala or Val or Thr or Absent or Cys or Asp or Asn or Gly or Leu or Ile
  misc_feature (238)..(238): Leu or Val or Ile or Phe or Lys or Glu or Ala or Ser or Absent or Thr or Gln or Asp or Met or Asn or His or Arg
  misc_feature (239)..(239): Asp or Glu or Thr or Asn or Val or Lys or Pro or Gln or Arg or Ala or Absent or Leu or Ile
  misc_feature (240)..(240): Ala or Leu or Thr or Asp or Glu or Tyr or Pro or Absent or Arg or Lys or Val or Asn or Ile or Ser or Gln or His or Cys
  misc_feature (241)..(241): Arg or Val or Tyr or Ser or Phe or Thr or Absent or Lys or Ile or Leu or Met or Ala or Gln or Asn
  misc_feature (242)..(242): Thr or Lys or Glu or Val or Gln or Arg or Leu or Met or Absent or Pro or Ala
  misc_feature (243)..(243): Phe or Tyr or Val or Ile or Absent or Leu or Met or Thr or Glu or Gln or Gly or Asp
  misc_feature (244)..(244): Val or Gly or Lys or Ser or Pro or Arg or Absent or Ala or Glu or Thr or His or Trp or Asn or Met or Ile
  misc_feature (245)..(245): Ser or Ala or Thr or Gly or Absent or Asn or Asp
  misc_feature (247)..(247): Thr or Pro or Ala or Ser or Gly or Absent or Gln or Lys or Val
  misc_feature (248)..(248): Thr or Glu or Pro or Gln or Ala or Asp or Absent or Leu or Val or Asn or Ser or Gly or Arg or Ile
  misc_feature (249)..(249): Leu or Glu or Ile or Ala or Val or Absent or Thr
  misc_feature (250)..(250): Ser or Val or Thr or Met or Lys or Ala or Ile or Trp or Arg or Absent or Gln or Glu or Leu
  misc_feature (251)..(251): Glu or Asp or Gln or Ile or His or Ser or Thr or Absent or Asn
  misc_feature (252)..(252): Ala or Ser or Gly or Absent or Lys or Asn or Arg or Met or Leu
  misc_feature (253)..(253): Phe or Leu or Met or Tyr or Ala or Absent or Thr or Ser or Val or Ile
  misc_feature (254)..(254): Ala or Asn or Met or Ile or Arg or Lys or Ser or Gln or Leu or Absent or Glu or Thr or Val
  misc_feature (255)..(255): Ala or Ser or Thr or Asn or Absent or Phe or Asp or Glu or Leu or Ile or Val or Lys or Tyr
  misc_feature (257)..(257): Absent or Asp or Ser or Ala or Gly
  misc_feature (258)..(258): Absent or Leu or Ala or Gln or Arg or Asp or Ser or Glu or Gly
  misc_feature (259)..(259): Absent or Ser or Gly or Asn or Arg or Lys or Ala
  misc_feature (260)..(260): Absent or Gly or Asn or Ala
  misc_feature (261)..(261): Gln or Lys or Glu or Asn or Arg or Ala or Absent or Gly or Asp or Ile or Leu or Thr or His or Met
  misc_feature (262)..(262): Ile or Val or Leu or Phe or Absent or His or Tyr or Ser
  misc_feature (264)..(264): Ile or Gly or Val or Phe or Ala or Leu or Absent or Cys
  misc_feature (265)..(265): Ala or Gly or Val or Ile or Thr or Tyr or Absent or Ser
  misc_feature (267)..(267): Ile or Met or Val or Leu or Phe or Absent or Ala or Thr or Trp or Gly or Ser or Cys
  misc_feature (269)..(269): Pro or Ile or Cys or Thr or Ala or Lys or Met or Ser or Absent or Tyr or Phe or Arg or Gly
  misc_feature (270)..(270): Gly or Glu or Val or Ala or Pro or Absent or Ser
  misc_feature (271)..(271): Pro or Leu or Met or Val or Ile or Ala or Absent or Thr or Lys or Gln or Phe
  misc_feature (272)..(272): Ala or Pro or Val or Gly or Thr or Absent or Ile or Met or Leu
  misc_feature (273)..(273): Ile or Met or Leu or Val or Absent or Thr or Ala or His or Phe or Tyr or Cys or Pro
  misc_feature (274)..(274): Ser or Lys or Thr or Pro or Asp or Ala or Tyr or Trp or Gln or Absent or Asn or Met or Ile or Leu or Gly
  misc_feature (275)..(275): Ala or Leu or Met or Pro or Ile or Absent or Tyr or Val or Ser or Thr or Arg or Cys
  misc_feature (276)..(276): Ala or Lys or Tyr or Ile or Leu or Thr or Arg or Absent or Asn or Ser or Gln or His or Asp or Glu or Trp
  misc_feature (277)..(277): Ser or Glu or Asp or His or Gln or Tyr or Phe or Absent or Ala or Leu or Met or Ile or Thr or Asn or Val or Gly
  misc_feature (279)..(279): Absent or Ala or Ser or Leu or Ile or Val or Lys or Thr or Asn or Arg
  misc_feature (280)..(280): Absent or Glu or Pro or Ile or Asn or Val
  misc_feature (281)..(281): Absent or Gly or Leu or Ser or Thr or Met or Lys or Ile or Val
  misc_feature (282)..(282): Absent or Val or Leu or Ala or Gly or Asn or Lys or Gln or Ile or Asp or Ser or Glu or Tyr or Phe or Met or Arg
  misc_feature (283)..(283): Absent or Thr or Gly or Arg or Lys or Ser or Asn or Asp or Glu
  misc_feature (284)..(284): Absent or Asn or Ser or Thr or Ala or Gly or Gln or Lys or Val or Pro or Cys or Arg or His
  misc_feature (285)..(285): Absent or Lys or Thr or Gln or Asn or Leu or Arg or Ser or Ala or Gly or Glu or Val or Ile or Pro or Asp or Phe
  misc_feature (286)..(286): Gly or Lys or Arg or Asn or Gln or Phe or Ser or Ala or Pro or Absent or Thr or Cys or Glu
  misc_feature (287)..(287): Val or Ile or Leu or Ala or Phe or His or Arg or Absent or Thr or Glu or Ser or Lys or Met or Cys or Tyr or Gln or Gly or Pro
  misc_feature (288)..(288): Pro or Asp or Gly or Ser or Absent or Asn or Glu or Ala or His or Lys or Arg
  misc_feature (289)..(289): Val or Leu or Ile or Ala or Thr or Absent or Met or Tyr or Phe
  misc_feature (290)..(290): Gln or Lys or Arg or Thr or Glu or Absent or Asn or Ala or Val or Ile or Tyr or Phe or Ser or Asp or Leu
  misc_feature (291)..(291): Ile or Ala or Val or Leu or Absent or Met or Asn or Thr or Ser
  misc_feature (292)..(292): Leu or Val or Ile or Thr or Ala or Ser or Absent or Pro or Gly
  misc_feature (293)..(293): Ala or Ser or Leu or Gly or Tyr or Phe or Absent or Thr or Met or Trp or Cys or Ile
  misc_feature (294)..(294): Gly or Leu or Ala or Pro or Trp or Thr or Ile or Absent or Val or Gln or Cys or Arg or Ser or Asn
  misc_feature (295)..(295): Ala or Gly or Val or Asn or Asp or Leu or Gln or Glu or Absent or Ile or Phe or Met
  misc_feature (296)..(296): Ala or His or Asn or Gln or Absent or Ser or Ile or Cys or Gly or Asp
  misc_feature (297)..(297): Glu or Arg or Gln or Thr or Ile or Val or Absent or Leu or Asn or Tyr or His or Lys
  misc_feature (300)..(300): Ala or Asn or Ser or Gln or Absent or Gly or Thr
  misc_feature (301)..(301): Val or Ala or Asn or Ser or Asp or Gly or Absent or Cys or Thr or Tyr
  misc_feature (303)..(303): Val or Met or Thr or Ile or Absent or Cys or Ala or Ser or Leu or Gln or Asn or Gly
  misc_feature (304)..(304): Ala or Val or Leu or Ile or Absent or Met or Gly or Phe
  misc_feature (305)..(305): Arg or Ser or Ala or Lys or Gly or Absent or His or Asn or Cys
  misc_feature (306)..(306): Lys or Pro or Asn or Thr or Ala or Arg or Glu or Ser or Absent or Val or Met or Gln or Gly or His or Leu or Ile
  misc_feature (307)..(307): Asp or Glu or Arg or Ser or Lys or His or Absent or Gln or Ala or Met or Val or Asn or Thr or Gly or Pro
  misc_feature (308)..(308): Ser or Ile or Glu or Leu or Phe or His or Tyr or Asp or Pro or Lys or Thr or Absent or Ala or Val
  misc_feature (309)..(309): Ser or Asn or Ala or Absent or His or Tyr or Gln or Lys or Leu or Trp or Glu or Met or Arg or Cys or Phe
  misc_feature (310)..(310): Ile or Lys or Gly or Ala or Absent or Ser or Asp or Asn or Glu or Leu or His or Gln or Arg or Thr or Tyr
  misc_feature (311)..(311): Arg or Val or Lys or Ser or Asn or Glu or Ala or Asp or Gly or His or Gln or Absent or Leu or Thr or Met
  misc_feature (312)..(312): Thr or Glu or Ile or Tyr or His or Val or Absent or Arg or Gly or Asn or Lys or Gln or Leu or Met
  misc_feature (313)..(313): Ala or Asp or Lys or Thr or Glu or Asn or Gln or Gly or Ser or Arg or Absent or Ile or Tyr or Val or Leu or Cys or Met
  misc_feature (314)..(314): His or Leu or Asp or Ser or Gly or Arg or Thr or Glu or Lys or Ala or Absent or Gln or Asn or Cys or Ile or Val or Pro
  misc_feature (315)..(315): Asp or Lys or Ile or Pro or Phe or Val or Leu or Met or Ala or Absent or Ser or Thr or Gly or His or Asn or Gln or Tyr
  misc_feature (316)..(316): Leu or Gly or Lys or Glu or Ala or Thr or Arg or Ser or Absent or Trp or Asp or Gln or Asn or Pro or Val or Ile
  misc_feature (317)..(317): Asp or Lys or Gln or Glu or Absent or Asn or Leu or Pro or Ile or Ala or Ser or Thr or Gly or Val or Arg or Trp
  misc_feature (318)..(318): Gly or Absent or Leu or Phe or Met or Trp or Asp or Glu or Ala or Lys or Ser or Pro or Arg or Val or Thr or His
  misc_feature (319)..(319): Lys or Absent or Glu or Ala or Arg or Gly or Tyr or Val or Pro or Gln or Asn or Ser or Thr or Leu or Asp or Met or His
  misc_feature (320)..(320): Ile or Absent or Gly or Gln or Phe or Ala or Leu or Asn or Met or Lys or Asp or Val or His or Glu or Pro or Ser
  misc_feature (321)..(321): Val or Absent or Lys or Leu or Met or Ala or Thr or Ser or Arg or Gln or Gly or His or Glu or Asn or Asp
  misc_feature (322)..(322): Absent or Asn or Thr or Glu or Ala or Ser or Pro or Gly
  misc_feature (323)..(323): Absent or Pro or Asp or Met or Gln or Thr or Lys or Arg or Leu or Val
  misc_feature (324)..(324): Absent or Asn or Arg or Trp or Ala or Gln or Pro or Val or Gly or Leu or Met
  misc_feature (325)..(325): Absent or Met or Gly or Asp or Gln or Glu or Lys or Ile or Val or Leu or Thr or Ser
  misc_feature (326)..(326): Absent or Gln or Ser or Asn or Ile or Arg or His or Ala or Pro
  misc_feature (327)..(327): Absent or Pro or Leu or Arg or Thr or Ala or Met
  misc_feature (328)..(328): Absent or Asp or Thr or Asn or Val or Ile or Glu or Ala or Ser
  misc_feature (329)..(329): Absent or Leu or Phe or Pro or Ser or Thr or Lys or Ala or Val or Ile
  misc_feature (330)..(330): Absent or Ala or Gln or Pro or Asp or Ser or Glu or Thr or Leu or Phe or His or Arg or Val or Tyr or Gly
  misc_feature (331)..(331): Absent or Lys or Glu or Leu or Phe or Tyr or Val or Ile or Ala or Ser or Thr or Arg or Met or Asp or Gln or Gly or Asn
  misc_feature (332)..(332): Absent or Phe or Leu or Val or Ile or Ala or Gly or Glu or Thr or Arg or His or Asp or Lys or Gln or Ser or Cys or Tyr
  misc_feature (333)..(333): Absent or Gly or Ala or Glu or Asp or Leu or Lys or Ile or Ser or Thr or Gln or Asn or Met or Arg or Val
  misc_feature (334)..(334): Absent or Arg or Asp or Ala or Lys or Glu or Asn or Gln or Gly or Ser or Thr or His
  misc_feature (335)..(335): Absent or Asp or Ser or Ala or Glu or Tyr or Phe or Lys or Met or Gly or Leu or Thr or Val or Arg or Asn or Pro or Gln
  misc_feature (336)..(336): Absent or Leu or Tyr or Lys or Pro or Glu or Ala or Arg or Thr or Ser or Ile or Met or Gln or Val
  misc_feature (337)..(337): Absent or Arg or Pro or Ala or Gln or Ser or Asp or Gly or Leu or Ile or Phe or Val
  misc_feature (338)..(338): Absent or Ser or Gln or Asp or Lys or Ala or Thr or Glu or Asn or Gly or Pro or Arg or Val
  misc_feature (339)..(339): Absent or Phe or Tyr or Gly or Ser or Asn or Lys or Thr or Arg or Ala or Val or Pro or Leu or Gln or Asp or Glu or His
  misc_feature (340)..(340): Absent or Trp or Val or Lys or Gly or Ser or Ala or Asn or Asp or Gln or Glu or Arg or Leu or Thr or His or Tyr or Phe
  misc_feature (341)..(341): Absent or Gln or Arg or Thr or Ala or Phe or Leu or Ser or Ile or Lys or Asp
  misc_feature (342)..(342): Absent or Lys or Ala or Arg or Glu or His or Ser or Gln or Gly or Asp or Asn or Thr
  misc_feature (343)..(343): Absent or Ser or Phe or Leu or Asn or Gln or Pro or His or Arg or Asp or Ala or Thr or Lys or Glu
  misc_feature (344)..(344): Absent or Pro or Glu or Gln or Thr or Gly or Met or Ala or Asn or Lys or Ser
  misc_feature (345)..(345): Absent or Leu or Glu or Asn or Pro or Lys or Gln or Gly or Arg or Ala or Asp
  misc_feature (346)..(346): Absent or Asp or Pro or Lys or Glu or Gln or Ser or Arg or Ala or Gly
  misc_feature (347)..(347): Absent or Asp or Pro or Lys or Glu or Leu or Ala or Ile or Ser or Val or Gln or Arg
  misc_feature (348)..(348): Absent or Arg or Met or Phe or Leu or Val or Trp or Ala or Ile or Pro
  misc_feature (349)..(349): Absent or Ser or Arg or Lys or Thr or Gln or Ala or Val or Ile or Pro or Asn
  misc_feature (350)..(350): Absent or Phe or Val or Ile or Tyr or Leu or Trp or Ala or Met or Ser or Cys
  misc_feature (351)..(351): Ala or Gly or Ser or Absent
  misc_feature (352)..(352): Val or Ile or Glu or Thr or Met or Tyr or Phe or His or Ser or Absent or Gln or Ala
  misc_feature (353)..(353): Pro or Leu or Phe or Glu or Asp or Thr or Absent or Val or Gly
  misc_feature (356)..(356): Gly or Leu or Phe or Tyr or Trp or Ser or Ala or Pro or Asn or His or Absent or Thr or Val or Glu
  misc_feature (357)..(357): Asn or Ser or Thr or Ala or Gly or Val or Absent
  misc_feature (358)..(358): Thr or Ile or Val or Met or Asn or Absent or Cys or Ser or Arg or Gly or Ala
  misc_feature (360)..(360): Asp or Asn or Phe or Tyr or Ala or Glu or Absent or Trp or His or Arg
  misc_feature (361)..(361): Ile or Cys or Thr or Leu or Val or Phe or Tyr or Met or Absent or Ala
  misc_feature (362)..(362): Ser or Leu or Met or Ile or Phe or Val or Trp or Absent or Cys or Gln or Glu or Asp or Tyr
  misc_feature (364)..(364): Arg or His or Lys or Gln or Absent or Tyr or Asn or Ser
  misc_feature (366)..(366): Leu or Met or Ala or Trp or Tyr or Val or Gln or Absent or Phe
  misc_feature (369)..(369): Glu or Asn or Arg or Asp or Lys or Gln or Ala or Gly or Thr or Ser or Absent or Leu or Val or Cys
  misc_feature (370)..(370): Asn or His or Ala or Glu or Lys or Thr or Gln or Gly or Phe or Ile or Met or Leu or Absent or Cys or Tyr or Ser
  misc_feature (372)..(372): Leu or Met or Val or Ile or Phe or Ala or Absent
  misc_feature (373)..(373): Lys or Ala or Asp or Glu or Asn or Thr or Pro or Val or Ile or Arg or Ser or His or Absent
  misc_feature (375)..(375): Lys or Asn or Asp or Val or Gly or Glu or Absent or Ile or Ser or Ala
  misc_feature (376)..(376): Ala or Absent or Ile or Leu or Val or Arg or Ser or Asp or Met or Phe or Tyr
  misc_feature (377)..(377): Ala or Absent or Arg or Gln or Glu or Lys or Tyr
  misc_feature (378)..(378): Gly or Absent or Pro or Asp or Arg or Ala or Lys or Ser or Thr
  misc_feature (379)..(379): Absent or Gln or Ala or Thr or Ser or Arg or Asp or Val or Gly or Pro
  misc_feature (380)..(380): Absent or Asn or Thr or Glu or Gly or His or Asp
  misc_feature (381)..(381): Absent or Ser or Glu or Ala or Lys or Pro
  misc_feature (382)..(382): Absent or Ala or Ser or Gly or Glu or Gln or Thr or Asn
  misc_feature (383)..(383): Absent or Asp or Asn or Gly
  misc_feature (384)..(384): Absent or Thr or Ile or Ser or Asn or Val or Leu
  misc_feature (385)..(385): Absent or Ala or Asp or Pro or Ser or Gly or Thr or Lys or Glu or Val
  misc_feature (386)..(386): Absent or Lys or Pro or Ser or Ala or Thr or Glu or Gln or Gly
  misc_feature (387)..(387): Absent or Leu or Ala or Arg or Ile or Pro or Val or Phe or His or Gln or Thr
  misc_feature (388)..(388): Absent or Ala or Lys or Ser or Val or Gly or Thr or Arg or Leu or Ile
  misc_feature (389)..(389): Absent or Pro or Glu or Asp or Arg or Ala or Val or Ile or Met or Gly or Thr or Asn or Leu or Phe or Gln or Lys
  misc_feature (390)..(390): Gly or Absent or Lys or Glu or Thr or Arg or Asn or Asp or Ser or Ala or Val or Gln or His or Leu
  misc_feature (393)..(393): Thr or Asn or Asp or Glu or Lys or Arg or Gln or Ser or Val or Absent or His or Gly or Leu or Ile or Met
  misc_feature (394)..(394): Val or Ile or Tyr or Phe or Leu or Cys or Absent or Thr or Met or Ser or Asn or Ala or Glu
  misc_feature (395)..(395): Val or Ile or Lys or Leu or Gln or Arg or Met or Ser or Glu or Absent or Thr or Asn or Ala
  misc_feature (396)..(396): Pro or Glu or Gly or Ala or Asp or Val or Ile or Leu or Ser or Thr or Tyr or Absent
  misc_feature (397)..(397): Ile or Leu or Met or Val or Thr or Phe or Absent or Ala or Asn
  misc_feature (401)..(401): Asp or Glu or Gln or Absent or Tyr or Ser or Lys or Met or Leu or Arg or Phe
  misc_feature (403)..(403): Val or Ala or Ile or Thr or Pro or Leu or Arg or Absent or Asp or Ser
  misc_feature (404)..(404): Ala or Asn or Thr or Gln or Val or Pro or Ser or Tyr or His or Absent or Glu or Gly or Asp or Met or Arg or Lys
  misc_feature (405)..(405): Ala or Glu or Gln or Asn or Lys or Gly or Ser or Absent or His or Leu or Cys or Val or Tyr or Thr or Phe
  misc_feature (406)..(406): Phe or Leu or Ile or Met or Absent or Val or Ala or Cys
  misc_feature (407)..(407): Ala or Gly or Glu or Ser or Tyr or Thr or Val or Arg or Gln or Lys or Absent or Asn
  misc_feature (408)..(408): Gly or Glu or Ala or Thr or Asn or Ser or Val or Ile or Absent or Met or Asp or Arg
  misc_feature (410)..(410): Arg or Gln or Val or Lys or Ala or Ser or Thr or Gly or Asp or Asn or Leu or Absent or Glu or His or Ile or Phe
  misc_feature (411)..(411): Ala or Ile or Leu or Val or Met or Gln or Absent or Thr or Ser
  misc_feature (412)..(412): Asp or Ser or His or Ala or Gly or Gln or Glu or Absent or Thr or Val or Lys or Leu or Tyr or Asn or Phe
  misc_feature (413)..(413): Ala or Gly or Cys or Thr or Ser or Absent or Val
  misc_feature (414)..(414): Ala or Tyr or Phe or Val or Met or Absent or Leu or Ile
  misc_feature (415)..(415): Leu or Cys or Ile or Phe or Met or Thr or Val or Ser or Absent or Ala or Trp
  misc_feature (416)..(416): Val or Glu or Leu or Thr or Gly or Met or Ile or Ala or Ser or Absent
  misc_feature (417)..(417): Pro or Ala or Gly or Ser or Gln or Absent
  misc_feature (418)..(418): Glu or Ala or His or Asp or Gly or Absent or Ser
  misc_feature (420)..(420): Trp or Phe or Gly or Ser or Ala or Met or Ile or Absent or Pro
  misc_feature (421)..(421): Gly or Pro or Asn or Cys or His or Absent or Ala or Thr or Ser
  misc_feature (422)..(422): Ala or Thr or Ser or Gln or Glu or Tyr or Absent or Gly or Asp or Leu or His or Asn or Arg or Met
  misc_feature (423)..(423): Ala or Lys or Met or Ile or Phe or Val or Gln or Leu or Thr or Arg or Gly or Glu or Absent or Pro or Ser or Asp or His or Tyr
  misc_feature (425)..(425): Glu or Val or Gln or Leu or Ile or Ala or Absent or Gly
  misc_feature (426)..(426): Ala or Lys or Leu or Met or Val or Ser or Arg or Ile or Asn or Glu or Gly or Tyr or Phe or Trp or Gln or Absent or His or Asp
  misc_feature (427)..(427): Gln or Val or Lys or Asp or Glu or Ala or Leu or Arg or Met or Thr or Asn or Absent or Cys or Ser
  misc_feature (428)..(428): Gly or Asp or Lys or Ala or Glu or Asn or Absent or Gln or Ser or Arg
  misc_feature (429)..(429): Absent or Glu or Asn or Ser or Lys
  misc_feature (430)..(430): Absent or Gly or Asp
  misc_feature (431)..(431): Absent or Gly
  misc_feature (432)..(432): Absent or Lys
  misc_feature (433)..(433): Absent or Gln
  misc_feature (434)..(434): Absent or Lys or Phe or Thr or Ala or Ser or Asn or Tyr or Val or Gly or Ile or Leu or Gln or Glu or Met or His
  misc_feature (436)..(436): Arg or Lys or Val or Glu or Phe or Tyr or Absent or Gln or Ile or Gly or His or Thr or Ala
  misc_feature (437)..(437): Val or Thr or Arg or Ile or Ser or Pro or Met or Leu or Gln or Absent or Gly or Cys
  misc_feature (438)..(438): Ile or Leu or Val or Phe or His or Gln or Trp or Arg or Ala or Ser or Gly or Absent or Met
  misc_feature (439)..(439): Gly or Phe or Met or Val or Ser or Thr or Arg or His or Leu or Lys or Ile or Asn or Tyr or Ala or Cys or Absent or Glu
  misc_feature (440)..(440): Asn or Glu or Asp or Tyr or Ala or Gln or Ser or Met or Leu or Phe or Thr or Ile or Val or Absent or Arg
  misc_feature (441)..(441): Glu or Ser or Thr or Leu or Gly or Absent or Asn or Asp or Lys
  misc_feature (442)..(442): Lys or Gln or Gly or Arg or Ala or Ser or Absent or Tyr or His or Asn or Ile or Thr or Leu
  misc_feature (443)..(443): Thr or Asp or Lys or Glu or Gln or Asn or Ala or Absent or Ser or Arg
  misc_feature (444)..(444): Val or Leu or Ile or Met or Glu or Phe or Absent
  misc_feature (446)..(446): Arg or Glu or Ser or Pro or Ala or Lys or Gln or Leu or Asp or Asn or Val or Thr or Absent or Met or Gly
  misc_feature (447)..(447): Gly or Absent
  misc_feature (448)..(448): Gly or Absent
  misc_feature (449)..(449): Asn or Gly or His or Asp or Arg or Lys or Tyr or Phe or Absent or Glu or Ala or Thr or Ser
  misc_feature (452)..(452): Ser or Cys or Asp or Gly or Glu or Absent
  misc_feature (453)..(453): Ala or Cys or Arg or Asn or Pro or Lys or Glu or Absent
  misc_feature (454)..(454): Ile or Gly or Val or Cys or Thr or Ala or Ser or Phe or Tyr or Absent or Met
  misc_feature (455)..(455): Leu or Val or Ile or Phe or Cys or Absent or Ser or X
  misc_feature (456)..(456): Ile or Val or Leu or Thr or Asn or Cys or Met or Phe or Ser or Ala or Gly or Absent
  misc_feature (457)..(457): Val or Leu or Met or Ile or Ala or Thr or Cys or Phe or Absent
  misc_feature (458)..(458): Asn or Arg or Ser or Gln or His or Gly or Ala or Pro or Met or Thr or Absent or Asp
  misc_feature (459)..(459): Thr or Asn or Lys or Asp or Gly or Glu or Gln or Arg or Ala or Absent or Ser or His
  misc_feature (460)..(460): Arg or Asp or Glu or Lys or Ala or Asn or His or Gln or Pro or Ser or Gly or Absent or Cys or Val or Thr
  misc_feature (461)..(461): Phe or Leu or Met or Ile or Asp or Glu or Val or Trp or Absent or Tyr or Pro
  misc_feature (462)..(462): Ala or Ile or Ser or Val or Cys or Leu or Lys or Arg or Thr or Absent or Asn or Tyr or Pro or Gly
  misc_feature (463)..(463): Gln or Lys or Glu or Arg or Met or Asp or Val or Ala or Ile or Thr or Asn or Ser or Absent
  misc_feature (464)..(464): Ala or Asn or Arg or Glu or Asp or Ser or Lys or Gly or Gln or Thr or Absent or Leu or His
  misc_feature (465)..(465): Absent or Pro
  misc_feature (466)..(466): Absent or Ala
  misc_feature (467)..(467): Asn or His or Tyr or Arg or Met or Ala or Asp or Absent or Gln or Glu
  misc_feature (469)..(469): Asp or Ala or Asn or Glu or Pro or Gln or Thr or Lys or Absent or Arg or His or Leu or Ile or Gly
  misc_feature (470)..(470): Leu or Ile or Val or Ala or Glu or Trp or Gln or Thr or Ser or Absent
  misc_feature (471)..(471): Val or Ala or Met or Ser or Phe or Tyr or Leu or Thr or Absent or His or Cys
  misc_feature (472)..(472): Ala or Glu or Lys or Gln or Arg or Gly or Leu or Met or Absent or Ile or Val or Thr or Ser or Asp or Phe
  misc_feature (474)..(474): Phe or Val or Ile or Leu or Met or Absent
  misc_feature (475)..(475): Leu or Ile or Val or His or Met or Thr or Ala or Asn or Tyr or Phe or Absent
  misc_feature (476)..(476): Lys or Arg or Asn or Ala or Thr or Asp or His or Met or Absent or Gln
  misc_feature (477)..(477): Ala or Glu or Val or Thr or Tyr or Gly or Ser or Absent or Cys
  misc_feature (478)..(478): His or Tyr or Val or Leu or Ile or Thr or Absent or Met
  misc_feature (479)..(479): Ala or Ile or Val or Gln or Glu or Leu or His or Met or Absent or Tyr or Ser
  misc_feature (480)..(480): Ser or Lys or Met or Asn or Ala or Glu or Arg or Gly or Asp or Gln or Absent or Thr
  misc_feature (482)..(482): Val or Gly or Thr or Ile or Ala or Gln or Ser or Cys or Absent or Pro or Leu or Asn
  misc_feature (483)..(483): Ala or Glu or Lys or Thr or Arg or Ser or Leu or Val or Gln or His or Gly or Asn or Phe or Ile or Met or Absent or Cys or Asp
  misc_feature (484)..(484): Phe or Lys or Tyr or Trp or Arg or His or Ile or Met or Absent or Leu or Glu
  misc_feature (485)..(485): Leu or Ala or Val or Asn or Asp or Ile or Met or Thr or Ser or Cys or Absent or Phe
  misc_feature (486)..(486): Asn or Glu or Gln or Met or Lys or Asp or Arg or Ser or Thr or His or Ala or Gly or Absent or Val
  misc_feature (487)..(487): Lys or Ala or Glu or Val or Leu or Gln or Ser or Asp or Thr or Asn or Absent or Gly or Arg or His
  misc_feature (488)..(488): Ser or Lys or Absent or Gly or Asn or Asp or Arg or His or Pro or Ala or Gln or Leu or Met or Phe or Glu or Ile or Val or Thr
  misc_feature (489)..(489): Absent or Pro or Thr or Lys or Arg or Glu or Asp or Ser or Ala or Leu or Val or Ile
  misc_feature (490)..(490): Absent or Ala or Asp
  misc_feature (491)..(491): Absent or Ala or Ser
  misc_feature (492)..(492): Absent or Gly
  misc_feature (493)..(493): Absent or Lys or Gly or Asn or Ser or Asp
  misc_feature (494)..(494): Absent or Phe or Leu or Met or Asn or Pro or Gly
  misc_feature (495)..(495): Absent or Ala or Lys or Glu or Pro or Gln or Thr or Gly or Ser or Asp or Asn or His or Val or Arg
  misc_feature (497)..(497): Absent or Arg or Met or Val or Ala or Thr or His or Phe or Lys or Leu or Ile or Trp or Cys
  misc_feature (498)..(498): Pro or Absent or His or Asn or Lys or Ala or Thr or Val or Asp or Ser or Glu or Gln or Arg or Met or Leu
  misc_feature (499)..(499): Ala or Asp or Pro or Val or Ile or Gln or Lys or Arg or Glu or Thr or Ser or Leu or Absent or His or Gly
  misc_feature (500)..(500): Ala or Glu or Asp or Arg or Met or Leu or Lys or Thr or Ile or Ser or Val or Gln or Absent or Cys or Asn
  misc_feature (501)..(501): Ala or Thr or Glu or Asp or Val or Gln or Met or Leu or Gly or Cys or Absent or Ser or Trp or Ile
  misc_feature (502)..(502): Gln or Ile or Ala or Asp or Ser or Leu or Gly or Thr or Arg or Glu or Lys or Pro or Asn or Absent or His
  misc_feature (503)..(503): Asn or Arg or Ala or Gly or Ile or Lys or Absent or Leu or Thr or Tyr or Val or Met or Trp
  misc_feature (504)..(504): Ala or Asp or Lys or Glu or Asn or Gln or Arg or Absent or Ser or Thr or Leu or Ile or Val or Cys or Met
  misc_feature (505)..(505): Val or Ile or Thr or Ala or Arg or Gly or Absent or Ser or Pro
  misc_feature (506)..(506): Asn or Ala or Thr or Tyr or Phe or Gly or Ser or Asp or Glu or Pro or Arg or Gln or Lys or Absent or Leu or His
  misc_feature (507)..(507): Arg or Thr or Ala or Val or Ser or Lys or Gly or Asn or His or Glu or Asp or Absent or Pro or Phe
  misc_feature (508)..(508): Gln or Lys or Arg or Asn or Ser or Gly or Thr or His or Met or Ala or Absent or Glu or Asp or Pro
  misc_feature (509)..(509): Leu or Tyr or Gln or Lys or Phe or Ile or Absent or Trp or His or Ala or Thr or Arg
  misc_feature (510)..(510): Gln or Leu or Val or Thr or Phe or Met or Ser or Ile or Ala or Absent
  misc_feature (511)..(511): Lys or Val or Gly or Thr or Ser or Asn or Pro or Asp or Absent or Ala or Arg or Glu
  misc_feature (512)..(512): Leu or Ala or Absent or Gly or Gln or Phe or Met or His or Thr or Cys or Val or Ile or Arg
  misc_feature (513)..(513): Thr or Glu or Val or Ala or Ser or Asp or Arg or Pro or Lys or Asn or Absent or Gln or Gly
  misc_feature (514)..(514): Gly or Glu or Pro or Asp or Asn or Lys or Ala or Leu or Val or Thr or Ile or Gln or Absent or Ser or Met or Phe or Arg or Cys or Tyr
  misc_feature (515)..(515): Glu or Gln or Ile or Val or Asn or Lys or Pro or Leu or Ala or Thr or Asp or Absent or Gly or Ser or Arg or His
  misc_feature (516)..(516): Thr or Val or Glu or Ala or Ile or Ser or Leu or Tyr or Asp or Asn or Absent or His or Gln or Cys or Trp
  misc_feature (517)..(517): Leu or Val or Met or Thr or Ile or X or Absent or Cys
  misc_feature (518)..(518): Asp or Glu or Val or Ile or Arg or Leu or Thr or Gln or Ser or Asn or Ala or Gly or Lys or Absent or Met
  misc_feature (519)..(519): Leu or Lys or Gln or Phe or Arg or Thr or Asn or Glu or Pro or Absent or Ala or Gly or Asp or Val or Met
  misc_feature (520)..(520): Arg or Absent or Glu or Gln or Lys or Val or Ala or Pro or Asp
  misc_feature (521)..(521): Val or Absent or Ala or Ser or Met or Leu or Ile or Arg or Pro or Cys or Gly or Thr
  misc_feature (522)..(522): Leu or Absent or Met or Glu or Thr or Ala or Val or Ile or Phe or Tyr or Ser
  misc_feature (523)..(523): Gln or Absent or Arg or Lys or Glu or Asn or Thr or Phe or Asp or Tyr or Pro or Ser or Val or Leu or Ala or His or Gly or Met
  misc_feature (525)..(525): Ala or Absent or Asn or Ser or Asp or Gln or Pro or Lys or Thr or Arg or Glu or Ile or Phe or His or Gly or Tyr or Val
  misc_feature (526)..(526): Tyr or Absent or Val or Pro or His or Ala or Ser or Gly or Glu or Phe or Ile or Leu or Met
  misc_feature (527)..(527): Ala or Absent or Asp or Pro or Ser or Leu or Glu or Arg or Val or Phe or Asn or Lys or Gln or Thr or Tyr or Gly
  misc_feature (528)..(528): Arg or Absent or Asp or His or Tyr or Pro or Ala or Glu or Gln or Asn or Leu or Met or Val or Phe or Ser or Gly or Thr
  misc_feature (529)..(529): Thr or Absent or Tyr or Glu or Ala or Asp or Gly or Gln or Trp or Val or Pro or Arg
  misc_feature (530)..(530): Arg or Absent or Ser or Glu or Val or Ala or Thr or Gly or Leu or Asn or Gln or Asp or His or Met or Lys or Pro
  misc_feature (531)..(531): Absent or Tyr or Gly or Glu or Phe or Asp or His
  misc_feature (532)..(532): Absent or Val or Gly or Leu or Arg or Ile or Asn
  misc_feature (533)..(533): Absent or Thr or Asp or Arg or Pro or Ala or Gly or Val or Ile or Tyr or Asn
  misc_feature (534)..(534): Absent or Pro or Glu or Ile or Asp or Ser or Ala or Asn or Gly or Thr
  misc_feature (535)..(535): Absent or Pro or Lys or Gly or Arg or Gln or Leu or Cys or Ala or Ser or Asn or Ile or Met
  misc_feature (536)..(536): Absent or Ala or Val or Pro or Gln or Glu or Gly or Arg or Lys or Ser
  misc_feature (537)..(537): Absent or Ile or Leu or Lys or Asn or Gln or Gly or Thr or Arg or Asp or Glu or Val or Ser or Ala or Pro or Met
  misc_feature (538)..(538): Absent or Gln or Lys or Arg or Ala or Thr or Ile or Asp or Ser or Glu or Val or Leu or Tyr or Phe or Pro or His or Gly or Asn
  misc_feature (539)..(539): Absent or His or Val or Leu or Lys or Arg or Gln or Phe or Glu or Thr or Asn or Asp or Ser or Ala or Gly or Trp
  misc_feature (540)..(540): Absent or Pro or Ala or Gly or Ser or Gln or Ile or Asp or Asn or Lys or Thr or Arg or Tyr or Val or Glu or Phe or Leu
  misc_feature (541)..(541): Absent or Glu or Asp or Asn or His or Gln or Ile or Val or Ser or Thr or Phe or Lys or Pro or Gly or Tyr or Cys or Ala or Leu or Arg
  misc_feature (542)..(542): Absent or Trp or Pro or Ala or Leu or Ser or Gly or Asp or Asn or Glu or Lys or His or Arg or Phe or Val or Ile
  misc_feature (543)..(543): Absent or Gly or Asp or Ser or Gln or Tyr or Leu or His or Asn or Lys or Ala or Met or Val or Ile or Phe or Thr or Pro or Glu
  misc_feature (544)..(544): Absent or Ser or Gln or Val or Ala or Pro or Glu or Arg or Thr or Phe or Tyr or Gly or Leu or Ile or Met or His or Cys
  misc_feature (545)..(545): Absent or Leu or His or Gly or Ala or Gln or Asp or Lys or Arg or Ile or Val or Thr or Tyr or Met or Pro or Cys or Glu or Ser
  misc_feature (546)..(546): Absent or Lys or His or Ser or Arg or Asn or Glu or Pro or Asp or Gly or Thr or Gln or Met or Ile or Leu or Tyr or Ala or Phe
  misc_feature (548)..(548): Absent or Ile or Arg or Asp or Asn or Gly or Lys or Phe or Tyr or Trp or Ser or His or Met or Gln or Leu or Thr or Val
  misc_feature (549)..(549): Absent or Ser or Gly or Arg or Phe or Tyr or Asp or Pro or Glu or Lys or Ala or Gln or Val or Thr or Asn or His or Ile or Leu
  misc_feature (550)..(550): Absent or Ala or Val or Leu or Gln or Asn or Arg or Pro or Tyr or Phe or Asp or Ser or Glu or Gly or His
  misc_feature (551)..(551): Absent or Trp or Thr or Gly or Pro or Ala or Ser or His or Asn or Gln or Leu or Asp or Phe or Tyr or Cys or Arg
  misc_feature (552)..(552): Absent or Asp or Trp or Pro or Ser or Gly
  misc_feature (553)..(553): Absent or Pro or Gln or His or Glu or Asp or Arg
  misc_feature (554)..(554): Absent or Thr or Asp or Arg
  misc_feature (555)..(555): Absent or Ser or Pro or Ile
  misc_feature (556)..(556): Absent or Thr or Glu
  misc_feature (557)..(557): Absent or Val or Lys or Ala
  misc_feature (558)..(558): Absent or Pro
  misc_feature (559)..(559): Absent or His or Glu or Asn or Arg or Lys or Thr or Phe or Gln or Gly or Tyr or Val or Ala or Asp or Ser or Leu or Pro
  misc_feature (560)..(560): Absent or Asp or Asn or Thr or Cys or Gly or Ala or Val or Ser or Tyr or Phe or His or Lys or Glu
  misc_feature (561)..(561): Absent or His or Pro or Gln or Ser or Asn or Thr or Gly or Val or Leu or Glu or Ala or Lys or Phe
  misc_feature (562)..(562): Absent or Ser or Val or Ala or Tyr or Gln or Arg or Asn or Thr
  misc_feature (563)..(563): Absent or Thr or Asn or Ser or Ala or Gly or Pro or Phe
  misc_feature (564)..(564): Absent or Tyr or Ile or Ser or Phe or Trp or Met or Arg or Leu or Ala or Asp
  misc_feature (565)..(565): Absent or Glu or Tyr or Phe or Cys or Ala or Thr or Gly or His or Arg or Pro or Leu
  misc_feature (566)..(566): Absent or Asn or Ser or Asp or Phe or Tyr or Trp or Arg or Gln or Ala or Cys or Gly or His
  misc_feature (567)..(567): Absent or Leu or Val or Pro or Ser or Arg or Gln or Ala or Lys or His or Tyr
  misc_feature (569)..(569): Thr or Leu or Pro or Met or Ala or Tyr or Phe or Absent or Gln or His or Asp or Glu or Lys or Arg
  misc_feature (570)..(570): Thr or Glu or Asp or Leu or Ile or Ala or Ser or Absent or Gly or Val or Met or Cys
  misc_feature (571)..(571): Ala or Glu or Val or Ile or Lys or Arg or Gln or Absent or Asn or His or Met or Leu or Tyr or Thr or Ser
  misc_feature (572)..(572): Ile or Lys or Asp or Asn or Glu or Ala or Phe or Arg or Trp or Absent or Leu
  misc_feature (573)..(573): Asp or Ser or Glu or Val or Ile or Leu or Met or Absent or Phe or Trp or Tyr or Asn
  misc_feature (574)..(574): Pro or Tyr or Ile or Thr or Phe or Val or Arg or Absent or Ser or Gln or Leu or Met or Ala
  misc_feature (575)..(575): Ala or Asn or Lys or Leu or Val or Asp or Ser or Glu or Thr or Arg or Gln or Absent or Gly or Met or His
  misc_feature (576)..(576): Ala or Glu or Met or Asp or Gln or His or Ser or Leu or Arg or Absent
  misc_feature (577)..(577): Leu or Phe or Tyr or Thr or Ile or Met or Absent or Ala or Ser or Asn or Asp or Glu or His
  misc_feature (578)..(578): Gln or Ala or Met or Lys or Arg or Pro or His or Cys or Tyr or Absent or Val or Ile or Leu or Glu or Gly
  misc_feature (579)..(579): Glu or Arg or Lys or Asn or Asp or Gln or Ala or Thr or Absent or Leu
  misc_feature (580)..(580): Tyr or Phe or Val or Ile or Leu or Gln or Thr or Trp or Absent or Ser or Cys or Asp or Gly
  misc_feature (581)..(581): Ala or Met or Leu or Asp or Gln or Ser or Arg or Val or Glu or Absent or Gly or Asn or His
  misc_feature (582)..(582): Asp or Val or Lys or Tyr or Leu or Ala or Ile or Absent or Gln or His or Phe or Asn or Trp or Met
  misc_feature (583)..(583): Leu or Glu or Gln or Arg or Lys or Gly or Thr or Asp or Val or Absent or Ile or Phe or Asn or His or Tyr or Ala
  misc_feature (584)..(584): Asn or Met or Leu or Ala or Val or Phe or Gly or Absent or Glu or Pro or Asp or Thr or Ser or Arg or Lys or Gln
  misc_feature (585)..(585): Absent or Gly or Glu or Asn or Asp or Thr or Gln or Leu or Lys
  misc_feature (586)..(586): Absent or Gln or Leu or Lys or Ala or Thr or Arg or Ser or Asn or Gly or Asp
  misc_feature (587)..(587): Absent or Ala or Thr or Ser or Arg or Lys or Gln or Pro or Gly or Leu or Tyr
  misc_feature (588)..(588): Absent or Ala
  misc_feature (589)..(589): Absent or Ala or Pro or Val
  misc_feature (590)..(590): Absent or Gln or Thr or Gly or Asp or Ala or Tyr or Val or Ile or Leu or Cys or Glu or Ser or His
  misc_feature (591)..(591): Absent or Phe or Glu or Ile or Val or Ala or Leu or Asp or Ser or Thr or Pro or Tyr or Gln or His or Met or Gly
  misc_feature (592)..(592): Absent or Leu or Ile or Lys or Gln or Glu or Asp or Pro or Asn or Ala or Thr or Gly or Val or Arg
  misc_feature (593)..(593): Absent or Asn or Gln or Ser or Asp or Ala or His or Gly or Thr or Pro or Lys or Leu or Tyr or Glu or Met or Val or Arg or Phe
  misc_feature (594)..(594): Absent or Leu or Tyr or Thr or Arg or Val or Lys or Asn or Gln or Asp or Ser or Gly or Glu or Pro or Ala or Ile or His
  misc_feature (595)..(595): Val or Ser or Ile or Thr or Gln or Ala or Leu or Absent or Glu or Asp or Gly or Lys or Pro or Phe or His or Arg
  misc_feature (596)..(596): Glu or Lys or Asp or Ser or Gln or Ala or Thr or Absent or Gly or Asn or Trp or Val
  misc_feature (597)..(597): Ala or Asn or Glu or Lys or Ser or Arg or Pro or Thr or Absent or Tyr or Phe or Leu or Val or Ile or Met or Asp or Gly
  misc_feature (598)..(598): Gly or Pro or Leu or Gln or Ala or Lys or Glu or Asp or Arg or Absent or Asn or Ile or Met or Phe or His or Thr
  misc_feature (599)..(599): Tyr or Pro or Leu or Val or Phe or Arg or Ala or Gln or His or Absent or Thr or Lys or Asn or Gly or Glu or Asp or Ser or Met
  misc_feature (600)..(600): Ile or Lys or Asp or Thr or Ala or Asn or Val or Absent or Leu or Arg or Met or Gly or Glu
  misc_feature (601)..(601): Arg or Tyr or Trp or Ala or Lys or Glu or Leu or Thr or His or Absent or Gly or Ser or Val or Asn or Ile
  misc_feature (602)..(602): Arg or Asp or Ser or Glu or Thr or Lys or Gly or Absent or Gln or Ala or Asn or His or Leu
  misc_feature (603)..(603): Ala or Glu or Asp or Ser or Gly or Absent or Lys or Gln or Arg or Thr or Asn
  misc_feature (604)..(604): Pro or Phe or Leu or Ile or Tyr or Absent or Val or Ala or Thr or Cys or Ser
  misc_feature (605)..(605): Asp or Val or Ile or Phe or Leu or Absent or Tyr or Trp or Met or Thr or Asn or His or Ala or Gln
  misc_feature (606)..(606): Leu or Asp or Glu or Gln or Asn or Absent or Ile or Val or Arg or Pro or Lys or His or Ser
  misc_feature (607)..(607): Lys or Asn or Leu or Thr or Val or Glu or Pro or Asp or Tyr or Absent or Ala or His or Gly or Ser or Ile or Gln
  misc_feature (608)..(608): Thr or Lys or Ser or Ala or Arg or Asp or Absent or Asn or Glu or Gln or Gly
  misc_feature (609)..(609): Leu or Phe or Tyr or Absent or Glu or Asp or Val or Pro or Ile or Asn or Ser or Thr
  misc_feature (610)..(610): Ile or Leu or Tyr or Val or Ala or Absent or Thr or Trp or Phe
  misc_feature (611)..(611): Arg or Gly or Lys or Asp or Glu or Ala or Phe or Absent or Gln or Thr or Leu or Ser or Met
  misc_feature (612)..(612): His or Lys or Glu or Asn or Ala or Arg or Gln or Thr or Gly or Absent or Ser or Asp or Leu
  misc_feature (613)..(613): Absent or Val or Ile or Ala or Thr or Lys or Ser or Leu or Gln or Gly or Trp or Asn
  misc_feature (614)..(614): Absent or Lys or Ala or Met or Val or Ser or Glu or His or Gly or Leu or Ile or Thr or Cys
  misc_feature (615)..(615): Absent or Gly or Ala or Glu or Asn or Pro or Asp or Thr or Ser or Lys or Arg or Ile or Leu or Gln or Val
  misc_feature (616)..(616): Absent or Gly or Ile or Glu or Val or Ala or Lys or Arg or Ser or Thr or Leu or Asp or Met or His or Asn or Pro
  misc_feature (617)..(617): Absent or Ala or Glu or Thr or Lys or Asn or Tyr or His or Leu or Val or Met or Phe or Ile or Gly or Asp or Ser or Gln
  misc_feature (618)..(618): Absent or Pro or Ile or Asp or Gly or Ser or Lys or Asn or Ala or Glu or Gln or Val or Phe
  misc_feature (619)..(619): Absent or Thr or Leu or Lys or Val or Gly or Ala or Gln or Phe or Tyr or Ile or Arg or Asn or Ser or Glu or Asp or Pro
  misc_feature (620)..(620): Absent or Pro or Leu or Gly or Trp or Arg or Asn or Thr or Gln or Lys or Ala or Ser or Glu or Val or Cys or Asp
  misc_feature (621)..(621): Absent or Thr or Arg or Asp or Phe or Pro or Ala or Val or Ser or Leu or His or Glu or Gly or Cys or Tyr or Met
  misc_feature (622)..(622): Absent or Pro or Asp or Ser or Gly or Ala or Lys or Gln or Thr
  misc_feature (623)..(623): Absent or Gly or Asn or Trp or Ser or Thr or Gln or Val
  misc_feature (624)..(624): Absent or Ser or Val or Thr or Gly or Ile or Ala or Glu
  misc_feature (625)..(625): Absent or Pro or Asn or Ala or Asp or Glu or Ser
  misc_feature (626)..(626): Absent or His or Arg or Ser or Tyr or Gly or Lys or Glu or Ala or Ile or Met
  misc_feature (627)..(627): Absent or Ile or Lys or Arg or Asn or Leu or Val or Thr or His or Met or Pro
  misc_feature (628)..(628): Absent or Ile or Thr or Arg or Ser or Leu or Met or Ala or Val or Pro
  misc_feature (629)..(629): Absent or Glu or Asn or Asp or Lys or Ser or Thr or Pro or Ala
  misc_feature (630)..(630): Absent or Gly or Val or Arg or Pro or Ala or Gln or Lys or Glu
  misc_feature (631)..(631): Absent or Ala or Met or Ile or Thr or Ser or Asn or Lys or Asp or Glu or Cys
  misc_feature (632)..(632): Absent or His or Arg or Glu or Asp or Met or Gln or Ala or Leu or Ile
  misc_feature (633)..(633): Absent or Ala or Asp or Val or Ile or Phe or Leu or Thr or Pro or Gly or Arg
  misc_feature (634)..(634): Absent or Asp or Thr or Ala or Lys or Pro or Ser or Leu or Gly or Glu
  misc_feature (635)..(635): Absent or Asp or Gly or Pro or Glu or Leu or Cys or Ala
  misc_feature (636)..(636): Absent or Trp or Asn or Val or Ala or Phe or Thr or Asp
  misc_feature (637)..(637): Absent or Val or Cys or Thr or Gly or Ala or Asp or Ser or Tyr or Phe
  misc_feature (638)..(638): Absent or Leu or Pro or Ser or Asp or Asn or Phe or Ala or Lys or Thr or Trp or Val
  misc_feature (639)..(639): Absent or Gly or Ala or Asp or Gln or Glu or Thr or Asn
  misc_feature (640)..(640): Absent or Asp or Gln or Gly or Ala or Glu or Val or Thr or Met or Ile or Leu or Ser or Tyr or Asn
  misc_feature (641)..(641): Absent or Glu or Gly or Thr or Lys or Leu or Ser or Pro or Ile or Val or Ala or Arg or Asp or Cys or Asn or Gln
  misc_feature (642)..(642): Absent or Ala or Val or Gly or Asp or Pro or Leu or Met or Glu or Arg or His or Thr or Cys or Ser or Gln or Asn
  misc_feature (643)..(643): Absent or Thr or Val or Leu or Arg or Ala or Glu or Asp or Lys or Gln or Ser or Pro or Phe or Gly or Trp or His or Tyr
  misc_feature (644)..(644): Absent or Pro or Ser or Gly or Val or Ala or Gln or Thr or Tyr or Met or Phe or Asp or Asn or Glu or His or Arg or Lys or Trp
  misc_feature (645)..(645): Absent or Thr or Val or Phe or Ser or Glu or Asp or Ala or Lys or Pro or Gln or Arg or Gly or Leu or Asn or Ile or Met
  misc_feature (646)..(646): Absent or Leu or Pro or Asn or Gly or Asp or Glu or Arg or Ala or Thr or Lys or Val or Ser or Met or His or Trp or Ile
  misc_feature (647)..(647): Absent or Thr or Gln or Met or Ser or Ile or Arg or Ala or Glu or Asp or His or Leu or Phe or Gly or Pro
  misc_feature (648)..(648): Absent or Pro or Thr or Asp or Leu or Ile or Gln or Tyr or Phe or Ser or Lys or Gly or Arg or His or Ala or Val or Glu
  misc_feature (649)..(649): Absent or Pro or Gly or Thr or Trp or Ser or Ala or Arg or Lys or His or Phe or Val or Ile or Gln or Glu or Asp or Asn
  misc_feature (650)..(650): Absent or Ala or Asp or Glu or Pro or Gly or Thr or Lys or Ser or Asn or His or Val or Gln
  misc_feature (651)..(651): Absent or Pro or Ser or Gln or Asp or Leu or Gly or Asn or Glu or Phe or His or Ala or Val or Ile or Thr or Arg or Lys or Cys
  misc_feature (652)..(652): Absent or Pro or Phe or Thr or Leu or Glu or Lys or Val or Ser or Ala or Ile or His or X
  misc_feature (653)..(653): Absent or Val or Glu or His or Thr or Ala or Arg or Gly or Ser or Gln or Leu or Ile or Phe or Asp or Met or X or Cys
  misc_feature (654)..(654): Absent or Ser or Arg or Glu or Lys or Ala or Met or Asp or Gly or Gln or X
  misc_feature (655)..(655): Absent or Ser or Lys or Glu or Thr or Ile or Gln or Gly or Phe or Tyr or Asp or Pro or X or Asn or Arg
  misc_feature (656)..(656): Absent or Pro or Glu or Asp or Lys or Arg or Thr or Ser or Ile or Val or Trp or X or Asn or Ala
  misc_feature (657)..(657): Absent or Ala or Val or Leu or Glu or Gln or Ile or Thr or Ser or Pro or Met or Lys or Arg or Trp or X or His or Gly
  misc_feature (658)..(658): Absent or Ile or Phe or Val or Tyr or Ala or Asp or Trp or Leu or X
  misc_feature (659)..(659): Absent or Thr or Glu or Lys or Asp or Gln or Val or Leu or Gly or Ala or Ser or Asn or X
  misc_feature (660)..(660): Absent or Pro or Leu or Val or Phe or His or Gly or Tyr or Ala or Ser or X or Thr
  misc_feature (661)..(661): Absent or Ser or Leu or Ala or Ile or Gln or Thr or Arg or Asn or Lys or Asp or Glu or Val or X or His
  misc_feature (662)..(662): Absent or Pro or Ala or Lys or Asp or Asn or Gln or Gly or Thr or Ser or Arg or Val or Glu or X
  misc_feature (663)..(663): Absent or Thr or Val or Pro or Asp or Ser or Lys or Asn or Leu or X or Ala or Ile or Phe
  misc_feature (664)..(664): Absent or Pro or Ser or Gly or Ala or Val or Leu or Ile or Glu or Asp or Thr or X or Met or Asn or Gln
  misc_feature (665)..(665): Absent or Val or Leu or Glu or Ala or Gly or Lys or Asp or Gln or Ser or Thr or Arg or Phe or Tyr or Pro or X
  misc_feature (666)..(666): Absent or Gln or Lys or Tyr or Glu or Ala or Asp or Thr or Gly or Ser or X or Phe
  misc_feature (667)..(667): Absent or Pro or Arg or Val or Leu or Ile or Ala or Tyr or Cys or X or Asp
  misc_feature (668)..(668): Absent or Pro or Ile or Lys or Gln or Ala or Ser or Asn or Arg or Leu or Glu or X or Asp or Thr or Met
  misc_feature (669)..(669): Absent or Pro or Phe or Glu or Gln or Ser or Lys or Asp or Asn or Arg or Ala or Ile or X or Gly
  misc_feature (670)..(670): Absent or Thr or Val or Gln or Phe or Pro or Ser or Ala or Gly or Lys or Arg or His or X or Leu or Met
  misc_feature (671)..(671): Absent or Thr or Gly or Ile or Lys or Ala or Glu or Phe or Leu or Gln or Val or X or Asp or Ser or Pro or Arg
  misc_feature (672)..(672): Absent or Pro or Leu or Glu or Asp or Gln or Lys or Ile or Met or Ala or Thr or Ser or Gly or Asn or Arg or X or Val
  misc_feature (673)..(673): Absent or Ala or Thr or Phe or Lys or Glu or Arg or Asn or Gln or Ile or Leu or Met or Val or His or Pro or Gly or Cys
  misc_feature (674)..(674): Absent or Pro or Leu or Asn or Tyr or Asp or Lys or Arg or Ala or Thr or Ser or His or Gln or Gly
  misc_feature (675)..(675): Absent or Thr or Ala or Gly or Leu or Ser or Lys or Arg or Pro or Gln
  misc_feature (676)..(676): Absent or Pro or Leu or Val or Arg or Phe or Ser or Ala or Met or Ile or Lys or Asp or Gly or Glu or His
  misc_feature (677)..(677): Absent or Ala or Thr or Leu or Pro or Lys or Ser or Val or Glu or Asp or Gly or Phe
  misc_feature (678)..(678): Absent or Pro or Val or Gln or Ala or Ile or Leu or Thr or Asp or Glu or Asn or Arg or Ser or Gly
  misc_feature (679)..(679): Absent or Thr or Ser or Gly or Ile or Ala or Asp or Asn or His or Leu or Gln or Pro or Lys or Val
  misc_feature (680)..(680): Absent or Pro or Val or Tyr or Thr or Ala or Gly or Ser or Phe or Asp or Leu or Ile or Met or Arg
  misc_feature (681)..(681): Absent or Thr or Pro or His or Asp or Asn or Gln or Ala or Glu or Val or Ile
  misc_feature (682)..(682): Absent or Pro or Leu or Val or Ala or Arg or Gly or Met or Ser or Lys or Asp
  misc_feature (683)..(683): Absent or Pro or Gly or Ser or Met or Val or Leu or Gln or Arg or Ile or Thr or Ala or Lys or Asn
  misc_feature (684)..(684): Absent or Thr or Leu or Ala or Val or Asp or Arg or Glu or Ser or Gly or Lys or Gln
  misc_feature (685)..(685): Absent or Ser or Pro or Leu or Gln or Gly or Arg or Glu or Asn or Val or Ile
  misc_feature (686)..(686): Absent or Gly or Val or Arg or Ala or Leu or Asn or Thr or Glu
  misc_feature (687)..(687): Absent or Phe or Gly or Glu or Asn or Lys
  misc_feature (688)..(688): Absent or Thr or Arg or Pro or Gly
  misc_feature (689)..(689): Absent or Ala or Ser or Pro
  misc_feature (690)..(690): Absent or Val or Arg
  misc_feature (691)..(691): Absent or Phe or Thr
  misc_feature (692)..(692): Absent or Ala or Leu
  misc_feature (693)..(693): Absent or Ile or Glu
  misc_feature (694)..(694): Absent or Ala
  misc_feature (695)..(695): Absent or Val or Ala
  misc_feature (696)..(696): Absent or Val or Leu or Thr
  misc_feature (697)..(697): Absent or Phe or Leu or Thr
  misc_feature (698)..(698): Absent or Ala or Pro
  misc_feature (699)..(699): Absent or Val or Ala
  misc_feature (700)..(700): Absent or Ala or Thr or Phe
  misc_feature (701)..(701): Absent or Tyr or Gln
  misc_feature (702)..(702): Absent or Ile or Leu or Phe
  misc_feature (703)..(703): Absent or Ile or Val or Leu
  misc_feature (704)..(704): Absent or Leu or Arg
  misc_feature (705)..(705): Absent or Arg or Met
  misc_feature (706)..(706): Absent or Arg or Ile
  misc_feature (707)..(707): Absent or Arg or Ser
  misc_feature (708)..(708): Absent or Ala or Phe or Pro
  misc_feature (709)..(709): Absent or Leu
  misc_feature (710)..(710): Absent or Ser
  misc_feature (711)..(711): Absent or Trp
  misc_feature (712)..(712): Absent or Met
  misc_feature (713)..(713): Absent or Pro
  misc_feature (714)..(714): Absent or Ile
  misc_feature (715)..(715): Absent or Val
  misc_feature (716)..(716): Absent or Val
  misc_feature (717)..(717): Absent or Met
  misc_feature (718)..(718): Absent or Leu
  misc_feature (719)..(719): Absent or Met
  misc_feature (720)..(720): Absent or Gly
  misc_feature (721)..(721): Absent or Val
  misc_feature (722)..(722): Absent or Gly
  misc_feature (723)..(723): Absent or Asp
  misc_feature (724)..(724): Absent or Gln
  misc_feature (725)..(725): Absent or Pro
  misc_feature (726)..(726): Absent or Ile
  misc_feature (727)..(727): Absent or Tyr
  misc_feature (728)..(728): Absent or Phe
  misc_feature (729)..(729): Absent or Leu
  misc_feature (730)..(730): Absent or Leu
  misc_feature (731)..(731): Absent or Ala
  misc_feature (732)..(732): Absent or Phe
  misc_feature (733)..(733): Absent or Ala
  misc_feature (734)..(734): Absent or Ala
  misc_feature (735)..(735): Absent or Val
  misc_feature (736)..(736): Absent or Trp
  misc_feature (737)..(737): Absent or Pro
  misc_feature (738)..(738): Absent or Ile
  misc_feature (739)..(739): Absent or Met
  misc_feature (740)..(740): Absent or Leu
  misc_feature (741)..(741): Absent or Asn
  misc_feature (742)..(742): Absent or Thr
  misc_feature (743)..(743): Absent or Ala
  misc_feature (744)..(744): Absent or Ala
  misc_feature (745)..(745): Absent or Gly
  misc_feature (746)..(746): Absent or Val
  misc_feature (747)..(747): Absent or Arg
  misc_feature (748)..(748): Absent or Gln
  misc_feature (749)..(749): Absent or Leu
  misc_feature (750)..(750): Absent or Asp
  misc_feature (751)..(751): Absent or Pro
  misc_feature (752)..(752): Absent or Arg
  misc_feature (753)..(753): Absent or Trp
  misc_feature (754)..(754): Absent or Leu
  misc_feature (755)..(755): Absent or Gln
  misc_feature (756)..(756): Absent or Leu
  misc_feature (757)..(757): Absent or Ser
  misc_feature (758)..(758): Absent or Ser
  misc_feature (759)..(759): Absent or Leu
  misc_feature (760)..(760): Absent or Ser
  misc_feature (761)..(761): Absent or Ala
  misc_feature (762)..(762): Absent or Thr
  misc_feature (763)..(763): Absent or Arg
  misc_feature (764)..(764): Absent or Trp
  misc_feature (765)..(765): Absent or Glu
  misc_feature (766)..(766): Absent or Thr
  misc_feature (767)..(767): Absent or Leu
  misc_feature (768)..(768): Absent or Arg
  misc_feature (769)..(769): Absent or Arg
  misc_feature (770)..(770): Absent or Val
  misc_feature (771)..(771): Absent or Ile
  misc_feature (772)..(772): Absent or Ile
  misc_feature (773)..(773): Absent or Pro
  misc_feature (774)..(774): Absent or Gly
  misc_feature (775)..(775): Absent or Val
  misc_feature (776)..(776): Absent or Val
  misc_feature (777)..(777): Absent or Gly
  misc_feature (778)..(778): Absent or His
  misc_feature (779)..(779): Absent or Val
  misc_feature (780)..(780): Absent or Leu
  misc_feature (781)..(781): Absent or Thr
  misc_feature (782)..(782): Absent or Gly
  misc_feature (783)..(783): Absent or Val
  misc_feature (784)..(784): Absent or Arg
  misc_feature (785)..(785): Absent or Leu
  misc_feature (786)..(786): Absent or Ala
  misc_feature (787)..(787): Absent or Ile
  misc_feature (788)..(788): Absent or Gly
  misc_feature (789)..(789): Absent or Ile
  misc_feature (790)..(790): Absent or Leu
  misc_feature (791)..(791): Absent or Trp
  misc_feature (792)..(792): Absent or Ile
  misc_feature (793)..(793): Absent or Val
  misc_feature (794)..(794): Absent or Leu
  misc_feature (795)..(795): Absent or Val
  misc_feature (796)..(796): Absent or Pro
  misc_feature (797)..(797): Absent or Cys
  misc_feature (798)..(798): Absent or Glu
  misc_feature (799)..(799): Absent or Met
  misc_feature (800)..(800): Absent or Leu
  misc_feature (801)..(801): Absent or Gly
  misc_feature (802)..(802): Absent or Val
  misc_feature (803)..(803): Absent or Ser
  misc_feature (804)..(804): Absent or Ala
  misc_feature (805)..(805): Absent or Gly
  misc_feature (806)..(806): Absent or Leu
  misc_feature (807)..(807): Absent or Gly
  misc_feature (808)..(808): Absent or Tyr
  misc_feature (809)..(809): Absent or Tyr
  misc_feature (810)..(810): Absent or Ile
  misc_feature (811)..(811): Absent or Leu
  misc_feature (812)..(812): Absent or Asp
  misc_feature (813)..(813): Absent or Thr
  misc_feature (814)..(814): Absent or Arg
  misc_feature (815)..(815): Absent or Asp
  misc_feature (816)..(816): Absent or Arg
  misc_feature (817)..(817): Absent or Leu
  misc_feature (818)..(818): Absent or Ala
  misc_feature (819)..(819): Absent or Tyr
  misc_feature (820)..(820): Absent or Ser
  misc_feature (821)..(821): Absent or Glu
  misc_feature (822)..(822): Absent or Leu
  misc_feature (823)..(823): Absent or Met
  misc_feature (824)..(824): Absent or Ala
  misc_feature (825)..(825): Absent or Met
  unsure (1)..(825): unsure at all Xaa locations
XXXXXXXXXXXXXXXXXXXXXXXXXXXXXXXXXXXXXXXXXXXXXXXXXXXXXXXXXXXXXXXXXXXXXXXXXXXXXXXXXXXXXXXXXXXXXXXXXXXXXXXXXXXXXXXXXXXXXXXXXXXXXXXXXXXXXXXXXXXXXXXXXXXXXXXXXXXXXXXXXXXXXXXXXXXXXXXXXXXXXXXXXXXXXXXXXXXXXXXXXXXXXXGXXXXXXXXXXXXAXXXGXXXXXXXXXGXXXXXXXXXXXWXXXXXXXXXGXXXXXXDXXHXLXXXXXXXXXGXXXXXXXXXXXXXXXXXXXNGXXIXXXXXXXXXXXXXXXXXXXXXXXXXXXXXXXXXXXXXXXXXXXXXXXXXXXFPXXXHXXXLXYXLAXXGXXPXXXXXXXXXXXXXXXXDVXXXXXPPPXMXXXXXXGXXXXXXXXXPXXXXAXXXXXXXXXXGXXXXXXXXXWXXXXHPXXXXXXXXXXXXXXXXPXXXXAXXXXXXXAXXXXXXXXXXXXXXNXXXXXXXXXXXXXXXXXXXXXXXXXXXGXXXXXXXXXXXXXXXXXXXXXXFXXXXXXXXXXXXXXXXXXXXSXXXXXXXXXXXXXXXXXXXXXXXXXXXXXXXXXXXXXXXXXXXXXXXXXXXXXXXXXXXXXXXXXXXXXXXXXXXXXXXXXXXXXXXXXXXXXXXXXXXXXXXXXXXXXXXXXXXXXXXXXXXXXXXXXXXXXXXXXXXXXXXXXXXXXXXXXXXXXXXXXXXXXXXXXXXXXXXXXXXXXXXXXXXXXXXXXXXXXXXXXXXXXXXXXXXXXXXXXXXXXXXXXXXXXXXXXXXXXXXXXXXXXXXXXXXXXXXXX

SEQ ID NO: 36465 - protein, 607 aa, Artificial sequence
  consensus sequence of seq id no: 478  and its homologs
  misc_feature (1)..(1): Absent or Glu
  misc_feature (2)..(2): Absent or Leu
  misc_feature (3)..(3): Absent or Thr
  misc_feature (4)..(4): Absent or Gln
  misc_feature (5)..(5): Absent or Pro
  misc_feature (6)..(6): Absent or His
  misc_feature (7)..(7): Absent or Gly
  misc_feature (8)..(8): Absent or Tyr
  misc_feature (9)..(9): Absent or Leu
  misc_feature (10)..(10): Absent or Asp
  misc_feature (11)..(11): Absent or Asp
  misc_feature (12)..(12): Absent or Glu
  misc_feature (13)..(13): Absent or Ala
  misc_feature (14)..(14): Absent or Ala
  misc_feature (15)..(15): Absent or Ala
  misc_feature (16)..(16): Absent or Ala
  misc_feature (17)..(17): Absent or Ala
  misc_feature (18)..(18): Absent or Val
  misc_feature (19)..(19): Absent or Asn
  misc_feature (20)..(20): Absent or Ser
  misc_feature (21)..(21): Absent or Ile
  misc_feature (22)..(22): Absent or Ala
  misc_feature (23)..(23): Absent or Arg
  misc_feature (24)..(24): Absent or Ser
  misc_feature (25)..(25): Absent or Ser
  misc_feature (26)..(26): Absent or Ser
  misc_feature (27)..(27): Absent or Ser
  misc_feature (28)..(28): Absent or Ser
  misc_feature (29)..(29): Absent or Ser
  misc_feature (30)..(30): Absent or Ile
  misc_feature (31)..(31): Absent or Gly
  misc_feature (32)..(32): Absent or Ser
  misc_feature (33)..(33): Absent or Gly
  misc_feature (34)..(34): Absent or Met or Glu
  misc_feature (35)..(35): Absent or Leu or Gly
  misc_feature (36)..(36): Absent or Glu or Asp
  misc_feature (37)..(37): Absent or Arg
  misc_feature (38)..(38): Absent or Pro or Ser
  misc_feature (39)..(39): Absent or Pro
  misc_feature (40)..(40): Absent or Ile or Ala or Met
  misc_feature (41)..(41): Absent or Leu or Glu or Phe or Tyr
  misc_feature (42)..(42): Absent or Lys or Ala or His or Glu
  misc_feature (43)..(43): Absent or Arg or Ser or Thr or Pro
  misc_feature (44)..(44): Absent or Tyr or Asp or Lys
  misc_feature (45)..(45): Absent or Arg or Ala or Lys or Pro
  misc_feature (46)..(46): Absent or Gly or Pro or Phe or Leu
  misc_feature (47)..(47): Absent or Glu or Ser
  misc_feature (48)..(48): Absent or Ala or Thr or Ser
  misc_feature (49)..(49): Absent or Ala or Met or Thr or Ile
  misc_feature (50)..(50): Absent or Asp or Asn or Val
  misc_feature (51)..(51): Absent or Pro or Ser or Leu
  misc_feature (52)..(52): Absent or Glu or His or Ala
  misc_feature (53)..(53): Absent or Glu or Asp or His
  misc_feature (54)..(54): Absent or Ile or Arg or Asn
  misc_feature (55)..(55): Absent or Pro or Asp
  misc_feature (56)..(56): Absent or Ala or Arg or Met or Lys or Pro
  misc_feature (57)..(57): Absent or Pro or Thr or Cys or Val
  misc_feature (58)..(58): Absent or Gly or Val or Ser or Cys
  misc_feature (59)..(59): Absent or Val or Gln or His
  misc_feature (60)..(60): Absent or Gly or Asn
  misc_feature (61)..(61): Met or Absent or Ser or Gln
  misc_feature (62)..(62): Asp or Absent or Gly or Gln
  misc_feature (63)..(63): Arg or Absent or Gly or Ile or Val
  misc_feature (64)..(64): Met or Absent or Ser or Glu or Gly
  misc_feature (65)..(65): Tyr or Absent or Met or Leu or Arg
  misc_feature (66)..(66): Ser or Absent or Glu or Ile
  misc_feature (67)..(67): Gly or Met or Ser or Absent or Asn
  misc_feature (68)..(68): Gly or Ser or Gln or Absent or Asn
  misc_feature (69)..(69): Gly or Ser or Gln or Absent or Asn
  misc_feature (70)..(70): Asp or Absent or Gln or Val
  misc_feature (71)..(71): Met or Absent or Gln or Ala or Val or Asn
  misc_feature (72)..(72): Gly or Absent or Gln or Ser
  misc_feature (73)..(73): Tyr or Leu or His or Absent or Asn
  misc_feature (74)..(74): Gly or Ala or Absent or Ser
  misc_feature (76)..(76): Glu or Gln or Asp or Absent or Gly
  misc_feature (77)..(77): Asn or Gln or Ala or Ser or Absent
  misc_feature (78)..(78): Gly or Gln or Pro or Absent or Ser
  misc_feature (79)..(79): Val or His or Ala or Leu or Absent or Ser
  misc_feature (80)..(80): Val or Gly or Ser or Absent or Asn
  misc_feature (81)..(81): Met or Arg or Ala or Leu or Absent or Ser
  misc_feature (82)..(82): Thr or Gly or Ala or Absent or Asn
  misc_feature (83)..(83): Arg or Asp or Ala or Thr or Absent or Phe
  misc_feature (84)..(84): Asp or Glu or Ala or Absent
  misc_feature (85)..(85): Pro or Ala or Absent or Thr
  misc_feature (87)..(87): Pro or Ala or Absent or Gln
  misc_feature (93)..(93): Ala or Arg or Gly or Val or Pro or Asp
  misc_feature (94)..(94): Asp or Gln or Glu or Gly
  misc_feature (97)..(97): Asp or Gly or Glu
  misc_feature (101)..(101): Asp or Leu or Lys
  misc_feature (104)..(104): Thr or Ala or Asn
  misc_feature (105)..(105): Lys or Gln or Glu
  misc_feature (109)..(109): Pro or Ala
  misc_feature (111)..(111): Ser or Absent
  misc_feature (112)..(112): Absent or Glu
  misc_feature (113)..(113): Absent or Phe
  misc_feature (114)..(114): Absent or Leu
  misc_feature (115)..(115): Absent or Ser
  misc_feature (116)..(116): Absent or Ser
  misc_feature (117)..(117): Absent or Lys
  misc_feature (118)..(118): Absent or Ser
  misc_feature (119)..(119): Absent or Ser
  misc_feature (120)..(120): Absent or Ala
  misc_feature (121)..(121): Absent or His
  misc_feature (122)..(122): Absent or Glu
  misc_feature (123)..(123): Absent or Leu
  misc_feature (124)..(124): Absent or Ala
  misc_feature (125)..(125): Absent or Ala
  misc_feature (126)..(126): Absent or Arg
  misc_feature (127)..(127): Absent or Ala
  misc_feature (128)..(128): Absent or Cys
  misc_feature (129)..(129): Absent or Pro
  misc_feature (130)..(130): Absent or Val
  misc_feature (131)..(131): Absent or Leu
  misc_feature (132)..(132): Absent or Ser
  misc_feature (133)..(133): Absent or Leu
  misc_feature (134)..(134): Absent or Thr
  misc_feature (135)..(135): Absent or Ala
  misc_feature (136)..(136): Absent or Cys
  misc_feature (137)..(137): Absent or Leu
  misc_feature (138)..(138): Absent or Asn
  misc_feature (139)..(139): Absent or Ala
  misc_feature (140)..(140): Absent or Thr
  misc_feature (141)..(141): Absent or Thr
  misc_feature (142)..(142): Absent or Thr
  misc_feature (143)..(143): Absent or Asp
  misc_feature (144)..(144): Absent or Val
  misc_feature (145)..(145): Absent or Gly
  misc_feature (146)..(146): Absent or Phe
  misc_feature (147)..(147): Absent or Arg
  misc_feature (148)..(148): Absent or Tyr
  misc_feature (149)..(149): Leu or Gln or Absent
  misc_feature (150)..(150): Glu or Asn or Absent
  misc_feature (151)..(151): Phe or Ile or Absent
  misc_feature (152)..(152): Cys or Ala or Absent
  misc_feature (158)..(158): Val or Ser or Thr or Ala or Gly
  misc_feature (159)..(159): Ser or Val or Ile
  misc_feature (162)..(162): Val or Ala or Leu or Ile
  misc_feature (164)..(164): Gly or Ala or Asn
  misc_feature (166)..(166): Glu or Ser or Pro or Lys or Gln
  misc_feature (170)..(170): Ile or Leu
  misc_feature (173)..(173): Phe or Leu or Val
  misc_feature (176)..(176): Ser or Absent
  misc_feature (177)..(177): Phe or Absent
  misc_feature (178)..(178): Ala or Absent
  misc_feature (179)..(179): Gly or Absent
  misc_feature (180)..(180): Arg or Absent
  misc_feature (181)..(181): Val or Absent
  misc_feature (182)..(182): Arg or Absent
  misc_feature (183)..(183): Leu or Absent
  misc_feature (184)..(184): Gln or Absent
  misc_feature (185)..(185): His or Absent
  misc_feature (186)..(186): Leu or Absent
  misc_feature (187)..(187): Tyr or Absent
  misc_feature (188)..(188): Ser or Absent
  misc_feature (189)..(189): Ser or Absent
  misc_feature (190)..(190): Met or Absent
  misc_feature (191)..(191): Phe or Absent
  misc_feature (192)..(192): Cys or Absent
  misc_feature (193)..(193): Pro or Absent
  misc_feature (194)..(194): Val or Absent
  misc_feature (195)..(195): Glu or Absent
  misc_feature (196)..(196): Asn or Absent
  misc_feature (197)..(197): Ser or Absent
  misc_feature (198)..(198): Leu or Absent
  misc_feature (199)..(199): Gly or Absent
  misc_feature (200)..(200): Gly or Absent
  misc_feature (201)..(201): Phe or Absent
  misc_feature (202)..(202): Val or Absent
  misc_feature (203)..(203): Leu or Absent
  misc_feature (204)..(204): Phe or Absent
  misc_feature (205)..(205): Phe or Absent
  misc_feature (212)..(212): Leu or Gln
  misc_feature (214)..(214): Gln or Val or Lys
  misc_feature (215)..(215): Gln or Ser or Tyr
  misc_feature (216)..(216): Thr or Gln or Arg or Pro or Met or Ile
  misc_feature (217)..(217): Lys or Gly or Leu or Pro
  misc_feature (218)..(218): Lys or Thr or Gly or Glu or Asp
  misc_feature (219)..(219): Gln or Ala or Asn or Asp or Lys or Pro
  misc_feature (220)..(220): Asn or Ser or Absent
  misc_feature (221)..(221): Ala or Pro or Absent
  misc_feature (222)..(222): Ala or Val or Absent
  misc_feature (223)..(223): Glu or Absent
  misc_feature (224)..(224): Gln or Absent
  misc_feature (225)..(225): Asn or Absent
  misc_feature (226)..(226): Arg or Absent
  misc_feature (227)..(227): Glu or Gly or Absent
  misc_feature (228)..(228): Asn or Glu or Gly or Absent
  misc_feature (229)..(229): Ile or Gly or Absent
  misc_feature (230)..(230): Gly or Asp or Absent
  misc_feature (231)..(231): Glu or Asn or Gly or Absent
  misc_feature (232)..(232): Ser or Gly or Absent
  misc_feature (233)..(233): Phe or Gly or Absent
  misc_feature (234)..(234): Arg or Gly or Ser or Absent
  misc_feature (235)..(235): Gln or Ala or Leu or Phe or Lys or Thr
  misc_feature (236)..(236): Phe or Asn or Ser or Glu or Ala
  misc_feature (238)..(238): Leu or Arg or His or Lys or Gly
  misc_feature (239)..(239): His or Ser or Absent or Lys
  misc_feature (240)..(240): Ser or Absent or Asn
  misc_feature (241)..(241): Ser or Val or Thr or Ala
  misc_feature (242)..(242): Gly or Ser or Ile or Asn or Lys
  misc_feature (243)..(243): Pro or Glu or Lys or Ser
  misc_feature (244)..(244): Ser or Arg or Asp or Glu
  misc_feature (245)..(245): Ile or Gln or Ala or Glu or Lys
  misc_feature (246)..(246): Thr or Leu or Pro or Ser or Lys
  misc_feature (247)..(247): Ser or Asp or Ala or Absent or Lys
  misc_feature (248)..(248): Ser or Glu or Asp or Absent or Leu
  misc_feature (249)..(249): Ser or Tyr or His or Absent or Ala or Asp or Glu
  misc_feature (250)..(250): Met or Asp or Ala or Leu
  misc_feature (251)..(251): Asp or Gly or Leu or Ser
  misc_feature (253)..(253): Met or Ser or Leu
  misc_feature (254)..(254): Gln or Val or Ala or Glu or Leu
  misc_feature (257)..(257): Ile or Absent or Glu or Ala
  misc_feature (258)..(258): Tyr or Absent or Pro or Ala or Lys or Glu
  misc_feature (259)..(259): Leu or Absent or Arg or Ser
  misc_feature (260)..(260): Asn or Absent or Thr or Ser or Lys
  misc_feature (261)..(261): Arg or Absent or Ile or Ser or Gly
  misc_feature (262)..(262): Glu or Absent or Ala or Gly
  misc_feature (263)..(263): Ala or Leu or Tyr or Met or Ile
  misc_feature (264)..(264): Pro or His or Asp or Met or Gln or Glu
  misc_feature (265)..(265): Ile or Gly or Ser or Leu
  misc_feature (266)..(266): Ser or Asp or Arg or Thr or Gly
  misc_feature (267)..(267): Glu or Ser
  misc_feature (268)..(268): Ala or Ser or Asp or Met
  misc_feature (269)..(269): Leu or Gly or Asn
  misc_feature (270)..(270): Arg or Ser or Asp or Glu or Lys or Gln
  misc_feature (271)..(271): Cys or Met or Ala or Leu
  misc_feature (272)..(272): Gln or Ala or Lys
  misc_feature (273)..(273): Ile or Ala or Glu or Met
  misc_feature (274)..(274): Glu or Arg or Gly or Ala
  misc_feature (275)..(275): Val or Leu
  misc_feature (276)..(276): Gln or Arg
  misc_feature (277)..(277): Lys or Arg or Asp
  misc_feature (278)..(278): Arg or Glu or Ser or Gln
  misc_feature (279)..(279): Absent or Ala or Ser
  misc_feature (280)..(280): Absent or Lys or Arg
  misc_feature (281)..(281): Absent or Arg or Ser
  misc_feature (282)..(282): Absent or Lys or Met
  misc_feature (283)..(283): Absent or Arg or Val
  misc_feature (284)..(284): Absent or Gln
  misc_feature (285)..(285): Absent or Met
  misc_feature (286)..(286): Absent or Gln
  misc_feature (287)..(287): Absent or Arg
  misc_feature (288)..(288): Absent or Glu
  misc_feature (289)..(289): Absent or Val
  misc_feature (290)..(290): Absent or Gln
  misc_feature (291)..(291): Absent or Arg
  misc_feature (292)..(292): Absent or His or Lys
  misc_feature (294)..(294): His or Gln or Absent
  misc_feature (297)..(297): Leu or Ile or Absent
  misc_feature (300)..(300): Gln or Lys
  misc_feature (302)..(302): Lys or His or Val or Gln
  misc_feature (307)..(307): Ile or Met or Thr
  misc_feature (316)..(316): Ala or Ser or Lys or Absent
  misc_feature (317)..(317): Ile or Val or Leu or Met or Absent
  misc_feature (318)..(318): Leu or Ile or Absent
  misc_feature (319)..(319): Asp or Arg or Glu or Absent
  misc_feature (320)..(320): Lys or Arg or Glu or Absent
  misc_feature (321)..(321): Ala or Gln or Arg
  misc_feature (323)..(323): Lys or Glu or Gln or Arg
  misc_feature (324)..(324): Ser or Ala or Val or Thr or Leu
  misc_feature (325)..(325): Leu or Gly or Ser
  misc_feature (326)..(326): Ser or Ala or Arg or Absent or Gly
  misc_feature (327)..(327): Absent or Gly
  misc_feature (328)..(328): Absent or Asp
  misc_feature (329)..(329): Absent or Gln
  misc_feature (330)..(330): Absent or Asn
  misc_feature (331)..(331): Absent or Leu
  misc_feature (332)..(332): Absent or Ala
  misc_feature (333)..(333): Absent or Ser
  misc_feature (334)..(334): Absent or Gly
  misc_feature (335)..(335): Absent or Ser
  misc_feature (336)..(336): Absent or Tyr
  misc_feature (337)..(337): Absent or Lys
  misc_feature (338)..(338): Absent or Gly
  misc_feature (339)..(339): Absent or Leu
  misc_feature (340)..(340): Absent or Gly
  misc_feature (341)..(341): Absent or Asn
  misc_feature (342)..(342): Absent or Gln
  misc_feature (343)..(343): Absent or Gly
  misc_feature (344)..(344): Absent or Ile
  misc_feature (345)..(345): Absent or Pro
  misc_feature (346)..(346): Absent or Gly
  misc_feature (347)..(347): Absent or Met
  misc_feature (348)..(348): Absent or Gly
  misc_feature (349)..(349): Absent or Ala
  misc_feature (350)..(350): Absent or Met
  misc_feature (351)..(351): Absent or Lys
  misc_feature (352)..(352): Absent or Glu
  misc_feature (353)..(353): Absent or Phe
  misc_feature (354)..(354): Absent or Gly
  misc_feature (355)..(355): Absent or Ser
  misc_feature (356)..(356): Absent or Leu
  misc_feature (357)..(357): Absent or Asn or Leu or Val
  misc_feature (358)..(358): Absent or Phe or Leu
  misc_feature (359)..(359): Absent or Pro or Ser or Gly
  misc_feature (360)..(360): Absent or Asp or Ala or Ser or Glu
  misc_feature (361)..(361): Absent or His or Phe or Ser
  misc_feature (362)..(362): Absent or Ile or Ser or Gln or Gly
  misc_feature (363)..(363): Absent or Leu or Asp or Lys
  misc_feature (364)..(364): Absent or Gly or Ala or Leu
  misc_feature (365)..(365): Absent or Ser or Asn or Gly or Thr
  misc_feature (366)..(366): Absent or Pro or Ser or Ile or Ala
  misc_feature (367)..(367): Absent or Ala or Pro or Tyr or Leu
  misc_feature (368)..(368): Absent or Thr or Glu or Gly
  misc_feature (369)..(369): Absent or Gly or Ala or Pro
  misc_feature (370)..(370): Absent or Ala or Asp or Val
  misc_feature (371)..(371): Absent or Glu or Thr or Gln or Ser or Pro
  misc_feature (372)..(372): Absent or Ala or Thr or Leu or Gly
  misc_feature (374)..(374): Asp or Leu or Absent or His or Pro or Gln
  misc_feature (375)..(375): Met or Ser or Gln or Tyr
  misc_feature (376)..(376): Asn or Glu or His or Ser or Gln
  misc_feature (377)..(377): Ser or Leu or Asn or Asp
  misc_feature (378)..(378): Pro or Ala or Met or Gln or Ser
  misc_feature (379)..(379): Ser or Asp or Thr or Asn
  misc_feature (380)..(380): Ala or Arg or Leu or Lys
  misc_feature (381)..(381): Val or Pro or Leu or Thr
  misc_feature (382)..(382): Asp or Glu or Ser or Asn
  misc_feature (383)..(383): Glu or Thr or Absent or Leu or Pro
  misc_feature (384)..(384): Thr or Gly or Absent or Asp or Ser
  misc_feature (385)..(385): Arg or Thr or Absent or Gly or Asp
  misc_feature (386)..(386): Ala or Gly or Absent or Phe or Asp or Pro
  misc_feature (387)..(387): Gln or Cys or Absent or Met or Glu or Val
  misc_feature (388)..(388): Leu or Absent or Ala or Thr or Pro
  misc_feature (389)..(389): Thr or Ser or Absent or Asn or Arg
  misc_feature (390)..(390): Asp or Ser or Absent or Asn or Pro
  misc_feature (391)..(391): Phe or Thr or Ile or Asp or Glu
  misc_feature (392)..(392): Asn or Ser or Glu
  misc_feature (393)..(393): Ile or Cys or Gln or Pro
  misc_feature (394)..(394): Ala or Cys or Met or Asn or Ile
  misc_feature (395)..(395): Leu or Ser or Met or Arg or His
  misc_feature (396)..(396): Ser or Thr or Gly or Asp
  misc_feature (397)..(397): Asn or Ser or Lys
  misc_feature (398)..(398): Leu or Pro or Ser or Lys or Ile or Ala
  misc_feature (399)..(399): Met or Ser or Pro or Arg or Glu or Ala or Gly
  misc_feature (400)..(400): Asp or Pro or Ala or Ser
  misc_feature (401)..(401): Tyr or Met or Arg or Ser or Gly
  misc_feature (402)..(402): Met or Arg or His or Pro or Leu
  misc_feature (403)..(403): His or Tyr or Pro or Phe
  misc_feature (404)..(404): Gly or Arg or Asp or Gln or Lys
  misc_feature (405)..(405): His or Ser or Gln or Gly or Pro or Thr
  misc_feature (406)..(406): Asn or Ala or Ser or Leu or Ile
  misc_feature (407)..(407): Gly or Asp or Ala or Ser
  misc_feature (408)..(408): Asp or Ser or Ala or Lys
  misc_feature (409)..(409): Glu or Cys or Thr or Ser or Ala or His
  misc_feature (410)..(410): Thr or Val or Asp or Pro or Lys or Absent
  misc_feature (411)..(411): Ser or Thr or Leu or Asn or Asp or Absent
  misc_feature (412)..(412): Ala or Ser or Cys or Ile or Absent
  misc_feature (413)..(413): Gly or Ser or Val or Trp or Absent or Leu
  misc_feature (414)..(414): Glu or Ser or Thr or Pro or Absent
  misc_feature (415)..(415): Arg or Ser or Thr or Asp or Absent or Ala
  misc_feature (416)..(416): Thr or Ser or Asp or Absent or Gly or Cys
  misc_feature (417)..(417): Gln or Ser or Leu or Ile or Arg
  misc_feature (418)..(418): Asp or Ser or Arg or Ala or Glu
  misc_feature (419)..(419): Asp or Ser or Leu or Pro
  misc_feature (420)..(420): Thr or Glu or Gln or Leu
  misc_feature (421)..(421): Asn or Ala or Asp or Thr
  misc_feature (422)..(422): Lys or Glu or Leu or Pro
  misc_feature (423)..(423): Asp or Ser or Gly or Asn
  misc_feature (424)..(424): Leu or Gln or Lys or Ser or Asp
  misc_feature (425)..(425): Gln or Ala or Gly or Absent or Ser
  misc_feature (426)..(426): Arg or Pro or Ala or Absent or Cys
  misc_feature (427)..(427): Ser or Ala or Gly or Absent or His or Arg
  misc_feature (428)..(428): Thr or Gly or Absent or Cys or Ala
  misc_feature (429)..(429): Tyr or Ala or Absent or Leu or Ser or Gly
  misc_feature (430)..(430): Leu or Asn or Ser or Glu or Absent
  misc_feature (431)..(431): Thr or Lys or Pro or Gln
  misc_feature (432)..(432): Glu or Cys or Arg or Gln or Leu
  misc_feature (433)..(433): Gly or Ala or Leu or Asp or Glu
  misc_feature (434)..(434): Glu or Gly or His or Asp or Ser
  misc_feature (435)..(435): Gln or Thr or Pro
  misc_feature (436)..(436): Lys or Arg or Ser or Phe or Absent or Pro
  misc_feature (437)..(437): Lys or Asp or Absent or Gly or Arg
  misc_feature (438)..(438): Ile or Cys or Gly or Absent or Ala or Tyr
  misc_feature (439)..(439): Met or Ser or Thr or Asp or Gln
  misc_feature (440)..(440): Asn or Val or Gln or Lys
  misc_feature (441)..(441): Ile or Glu or Arg
  misc_feature (442)..(442): Lys or Arg or Gln or Ile
  misc_feature (443)..(443): Leu or Pro or Met or Arg
  misc_feature (445)..(445): Glu or Gln or Pro or Ser
  misc_feature (446)..(446): Thr or Gly or Pro or Asn or Ser
  misc_feature (447)..(447): Ser or Glu or Lys or Asn or Gly or Asp
  misc_feature (448)..(448): Val or Glu or Arg or Met or Thr or Leu or Ile
  misc_feature (449)..(449): Ser or Ala or Thr or Asp or Glu
  misc_feature (450)..(450): Phe or Thr or Arg or Pro or His
  misc_feature (451)..(451): Asp or Absent or Asn or Gly or Gln or Arg or His or Tyr
  misc_feature (452)..(452): Leu or Phe or Thr or Asp or Gly
  misc_feature (453)..(453): Asn or Leu or Asp or Ser
  misc_feature (454)..(454): Ser or Gln or Leu or Glu or Asp or Asn
  misc_feature (455)..(455): Arg or Asp or Glu
  misc_feature (456)..(456): Ser or His or Absent or Phe or Leu
  misc_feature (457)..(457): Ser or Glu or Asn or Thr or Ile or Absent or Ala or Pro
  misc_feature (458)..(458): Tyr or Asp or Gln or Ser or Absent or Leu or Pro
  misc_feature (459)..(459): Asp or Glu or Ala or Absent or Pro or Ser
  misc_feature (460)..(460): Phe or Asp or Met or Absent or Arg or Leu or His
  misc_feature (461)..(461): Ile or Glu or Gln or Tyr or Absent or Lys
  misc_feature (462)..(462): Gly or Ala or Glu or Absent or Val
  misc_feature (463)..(463): Met or Glu or Absent or Leu or Pro
  misc_feature (465)..(465): Ser or Ala or Gln or Pro or Absent
  misc_feature (466)..(466): Absent or Asp or Glu or Ala or Lys
  misc_feature (467)..(467): Absent or Val or Glu or Leu or Gly or Ser
  misc_feature (468)..(468): Absent or Gly or Gln or Ser
  misc_feature (469)..(469): Absent or Ala or Gly
  misc_feature (470)..(470): Absent or Ala or Asp or Ser
  misc_feature (471)..(471): Ala or Glu or Gly or Absent or Asp or Asn
  misc_feature (472)..(472): Ala or Tyr or Leu or Absent or Phe
  misc_feature (473)..(473): Leu or Ala or Asp or Absent or Arg
  misc_feature (474)..(474): Glu or Gly or Absent or Gln
  misc_feature (475)..(475): Ala or Asp or Lys or Absent or Glu
  misc_feature (476)..(476): Lys or Glu or Absent or Ser
  misc_feature (477)..(477): His or Asp or Phe or Absent or Ser
  misc_feature (478)..(478): Phe or Gly or Glu or Absent or Val
  misc_feature (479)..(479): Ser or Thr or Ala or Absent or Leu
  misc_feature (480)..(480): Asn or Ser or Absent or Leu
  misc_feature (482)..(482): Arg or Glu or Lys or Absent or Ser
  misc_feature (483)..(483): Leu or Ile or Absent or Ser
  misc_feature (484)..(484): Glu or Asp or Lys or Absent or Thr or Ala
  misc_feature (485)..(485): Ile or Leu or Arg or Absent or Ala or Val
  misc_feature (486)..(486): Absent or Asn or Pro or Arg or His
  misc_feature (487)..(487): Absent or Arg or Ser or Phe
  misc_feature (488)..(488): Absent or Cys or Pro or His or Asp
  misc_feature (489)..(489): Absent or Lys or Arg or Ser
  misc_feature (490)..(490): Absent or Leu or Arg
  misc_feature (491)..(491): Absent or Thr or Ser or Glu
  misc_feature (492)..(492): Absent or Ser or Pro or Phe
  misc_feature (493)..(493): Absent or Thr or Leu or Gly
  misc_feature (494)..(494): Absent or Gly or Ala or Asn or Glu or Asp
  misc_feature (495)..(495): Absent or Val or Ala or Pro
  misc_feature (496)..(496): Absent or Ser or Glu or Asn or Gly or Asp
  misc_feature (497)..(497): Absent or Ser or Arg or Glu or Cys
  misc_feature (498)..(498): Absent or Gln or Met or Asn or Arg
  misc_feature (499)..(499): Absent or Leu or Ser or Gly or Val
  misc_feature (500)..(500): Absent or Glu or Pro or Phe
  misc_feature (501)..(501): Absent or Ala or Met or Thr
  misc_feature (502)..(502): Absent or Ile or Asn or Asp
  misc_feature (503)..(503): Absent or Cys or Asn or Val or Gly
  misc_feature (504)..(504): Absent or Leu or Thr or Ser
  misc_feature (505)..(505): Absent or Glu or Gly or Val
  misc_feature (506)..(506): Absent or Asn or Ala or Ser or Arg
  misc_feature (507)..(507): Absent or Leu or Met or Asp or Gln
  misc_feature (508)..(508): Absent or Pro or Val or Asp
  misc_feature (509)..(509): Absent or Ala or Gln
  misc_feature (510)..(510): Absent or Leu or Gly
  misc_feature (511)..(511): Absent or Ala or Arg
  misc_feature (512)..(512): Absent or Arg or Asn
  misc_feature (513)..(513): Absent or Leu or Ser
  misc_feature (514)..(514): Absent or Glu or Pro
  misc_feature (515)..(515): Absent or Leu or Phe
  misc_feature (516)..(516): Absent or Pro or Gly
  misc_feature (517)..(517): Absent or Ser
  misc_feature (518)..(518): Absent or Asp
  misc_feature (519)..(519): Absent or Ala
  misc_feature (520)..(520): Absent or Asp
  misc_feature (521)..(521): Absent or Ala
  misc_feature (522)..(522): Absent or Asp
  misc_feature (523)..(523): Absent or Ala
  misc_feature (524)..(524): Absent or Ala
  misc_feature (525)..(525): Absent or Ala
  misc_feature (526)..(526): Absent or Arg
  misc_feature (527)..(527): Absent or Ile
  misc_feature (528)..(528): Absent or His
  misc_feature (529)..(529): Absent or Arg
  misc_feature (530)..(530): Absent or Phe
  misc_feature (531)..(531): Absent or His
  misc_feature (532)..(532): Absent or Gly
  misc_feature (533)..(533): Absent or Arg
  misc_feature (534)..(534): Absent or Pro
  misc_feature (535)..(535): Absent or Val
  misc_feature (536)..(536): Absent or Leu
  misc_feature (537)..(537): Absent or Pro
  misc_feature (538)..(538): Absent or Ser
  misc_feature (539)..(539): Absent or Ala
  misc_feature (540)..(540): Absent or Gly
  misc_feature (541)..(541): Absent or Leu
  misc_feature (542)..(542): Absent or Arg
  misc_feature (543)..(543): Absent or Asn
  misc_feature (544)..(544): Absent or Arg
  misc_feature (545)..(545): Absent or Pro
  misc_feature (546)..(546): Absent or Trp
  misc_feature (547)..(547): Absent or Thr
  misc_feature (548)..(548): Absent or Pro
  misc_feature (549)..(549): Absent or Ala
  misc_feature (550)..(550): Absent or Ala
  misc_feature (551)..(551): Absent or Ala
  misc_feature (552)..(552): Absent or Leu
  misc_feature (553)..(553): Absent or Ala
  misc_feature (554)..(554): Absent or Gly
  misc_feature (555)..(555): Absent or Val
  misc_feature (556)..(556): Absent or Asp
  misc_feature (557)..(557): Absent or Glu
  misc_feature (558)..(558): Absent or Leu
  misc_feature (559)..(559): Absent or Thr
  misc_feature (560)..(560): Absent or Ser
  misc_feature (561)..(561): Absent or Gly
  misc_feature (562)..(562): Absent or Leu
  misc_feature (563)..(563): Absent or Gly
  misc_feature (564)..(564): Absent or Leu
  misc_feature (565)..(565): Absent or Gly
  misc_feature (566)..(566): Absent or Leu
  misc_feature (567)..(567): Absent or Gly
  misc_feature (568)..(568): Absent or Arg
  misc_feature (569)..(569): Absent or Gly
  misc_feature (570)..(570): Absent or Arg
  misc_feature (571)..(571): Absent or Ala
  misc_feature (572)..(572): Absent or Ala
  misc_feature (573)..(573): Absent or Gly
  misc_feature (574)..(574): Absent or Val
  misc_feature (575)..(575): Absent or Ala
  misc_feature (576)..(576): Absent or Gly
  misc_feature (577)..(577): Absent or Gly
  misc_feature (578)..(578): Absent or Gly
  misc_feature (579)..(579): Absent or Phe
  misc_feature (580)..(580): Absent or Gly
  misc_feature (581)..(581): Absent or Gly
  misc_feature (582)..(582): Absent or Arg
  misc_feature (583)..(583): Absent or Pro
  misc_feature (584)..(584): Absent or Glu
  misc_feature (585)..(585): Absent or Val
  misc_feature (586)..(586): Absent or Gly
  misc_feature (587)..(587): Absent or Gly
  misc_feature (588)..(588): Absent or Gly
  misc_feature (589)..(589): Absent or Glu
  misc_feature (590)..(590): Absent or His
  misc_feature (591)..(591): Absent or Gly
  misc_feature (592)..(592): Absent or Asp
  misc_feature (593)..(593): Absent or Pro
  misc_feature (594)..(594): Absent or Arg
  misc_feature (595)..(595): Absent or Gly
  misc_feature (596)..(596): Absent or Gly
  misc_feature (597)..(597): Absent or Gly
  misc_feature (598)..(598): Absent or Ala
  misc_feature (599)..(599): Absent or Val
  misc_feature (600)..(600): Absent or Leu
  misc_feature (601)..(601): Absent or Arg
  misc_feature (602)..(602): Absent or Thr
  misc_feature (603)..(603): Absent or Arg
  misc_feature (604)..(604): Absent or Phe
  misc_feature (605)..(605): Absent or Cys
  misc_feature (606)..(606): Absent or Trp
  misc_feature (607)..(607): Absent or Ala
  unsure (1)..(607): unsure at all Xaa locations
XXXXXXXXXXXXXXXXXXXXXXXXXXXXXXXXXXXXXXXXXXXXXXXXXXXXXXXXXXXXXXXXXXXXXXXXXXGXXXXXXXXXXRXRLRWTXXLHXRFVXAVXXLGGXDXXXXXXXXXXXXXXXXXXXXXXXXXXXXXXXXXXXXXXXXXXRATPKXXLRXMXVXGLTXYHXKSXXXXXXXXXXXXXXXXXXXXXXXXXXXXXXHLQKYRXAXXXXXXXXXXXXXXXXXXXXXXXDXXXXXXXXXXXXXXDXXADXXXXXXXXXXXXXXXXXXXXXXXXXXXXXXXXXXXXLXEQXEVXRXLQLRXEAQGRYLQXXXXXXQXXXXXXXXXXXXXXXXXXXXXXXXXXXXXXXXXXXXXXXXXXXXXXXXXXEXXXXXXXXXXXXXXXXXXXXXXXXXXXXXXXXXXXXXXXXXXXXXXXXXXXXXXXXXXXXXXXXXXXXXXVXXXXXXXXXXXXXXXXXXXEXXXXXXXXXXXXXXXXSXXXXXXXXXXXXXXXXXXXXXXXXXXXXXXXXXXXXXXXXXXXXXXXXXXXXXXXXXXXXXXXXXXXXXXXXXXXXXXXXXXXXXXXXXXXXXXXXXXXXXXXXXXXXXXXXXXXXXXXXXXXXXX

SEQ ID NO: 36466 - protein, 111 aa, Artificial sequence
  consensus sequence of seq id no: 488  and its homologs
  misc_feature (4)..(4): Absent or Tyr
  misc_feature (7)..(7): Val or Gln or Phe
  misc_feature (8)..(8): Gln or His or Val or Leu
  misc_feature (9)..(9): Gln or Asn or Leu
  misc_feature (11)..(11): Phe or Leu
  misc_feature (15)..(15): Ser or Thr or Cys
  misc_feature (16)..(16): Cys or Ile or Phe
  misc_feature (17)..(17): His or Ser or Leu
  misc_feature (18)..(18): Glu or Absent or Phe
  misc_feature (19)..(19): Lys or Absent or Leu
  misc_feature (20)..(20): Tyr or Absent or His
  misc_feature (21)..(21): Leu or Absent or Asp
  misc_feature (22)..(22): Tyr or Absent or Ala
  misc_feature (23)..(23): Ile or Absent or Ser
  misc_feature (24)..(24): Absent or Gly
  misc_feature (25)..(25): Absent or Leu
  misc_feature (26)..(26): Absent or Thr
  misc_feature (27)..(27): Absent or Leu
  misc_feature (28)..(28): Absent or Ser
  misc_feature (29)..(29): Absent or Phe
  misc_feature (30)..(30): Absent or Thr
  misc_feature (31)..(31): Absent or Pro
  misc_feature (32)..(32): Absent or Leu
  misc_feature (33)..(33): Absent or Tyr
  misc_feature (34)..(34): Absent or Val
  misc_feature (35)..(35): Absent or Tyr
  misc_feature (36)..(36): Absent or Asn
  misc_feature (37)..(37): Absent or Pro or Ser
  misc_feature (38)..(38): Absent or Asp or Tyr
  unsure (1)..(111): unsure at all Xaa locations
MDSXKSXXXLXLLFXXXXXXXXXXXXXXXXXXXXXXXXLTQAHAHVQGLSNRKMMMMKMESEWVGANGEAEKAKTKGLGLHEELRTVPSGPDPLHHHVNPPRQPRNNFQLP

SEQ ID NO: 36467 - protein, 89 aa, Artificial sequence
  consensus sequence of seq id no: 490  and its homologs
  misc_feature (2)..(2): Arg or Gln or Ala
  misc_feature (3)..(3): Arg or His
  misc_feature (4)..(4): His or Phe or Met
  misc_feature (5)..(5): Asp or Lys or Arg
  misc_feature (6)..(6): Absent or Pro
  misc_feature (7)..(7): Absent or Arg
  misc_feature (8)..(8): Absent or Met
  misc_feature (9)..(9): Absent or Ser
  misc_feature (10)..(10): Absent or Arg
  misc_feature (11)..(11): Absent or Leu or Gln
  misc_feature (12)..(12): Ile or Thr
  misc_feature (13)..(13): Ile or Phe
  misc_feature (14)..(14): Ile or Val
  misc_feature (15)..(15): Lys or His or Tyr
  misc_feature (18)..(18): Leu or Phe
  misc_feature (19)..(19): Leu or Ala
  misc_feature (20)..(20): Met or Trp
  misc_feature (21)..(21): Cys or Leu
  misc_feature (24)..(24): Leu or Val or Ala
  misc_feature (25)..(25): Ser or Ala
  misc_feature (26)..(26): Absent or Ser
  misc_feature (27)..(27): Absent or Gln or Ala
  misc_feature (28)..(28): Absent or Gln or Leu
  misc_feature (29)..(29): Arg or Asn
  misc_feature (30)..(30): Phe or His
  misc_feature (31)..(31): Val or Ser
  misc_feature (32)..(32): Thr or Ser
  misc_feature (33)..(33): Absent or Asn
  misc_feature (34)..(34): Absent or Ile or Ala
  misc_feature (35)..(35): Absent or Lys or Ser
  misc_feature (36)..(36): Absent or Val
  misc_feature (37)..(37): Arg or Gln
  misc_feature (38)..(38): Glu or Ala
  misc_feature (39)..(39): Cys or Val or Met
  misc_feature (40)..(40): Gln or Glu
  misc_feature (41)..(41): Glu or Ala or Ser
  misc_feature (46)..(46): Ile or Pro or Leu
  misc_feature (47)..(47): Gly or Asn or Arg
  misc_feature (48)..(48): Pro or Thr
  misc_feature (49)..(49): Ala or Leu
  misc_feature (50)..(50): Lys or Gln or Glu
  misc_feature (51)..(51): Ile or Leu or Ala
  misc_feature (52)..(52): Ile or Thr or Asn
  misc_feature (53)..(53): Ala or Ser or Pro
  misc_feature (55)..(55): Pro or Ser or Gln
  misc_feature (56)..(56): Asn or His or Gln
  misc_feature (57)..(57): Asn or Lys
  misc_feature (58)..(58): Ala or Gly
  misc_feature (59)..(59): Arg or Asn or His
  misc_feature (61)..(61): Met or Leu or Ile
  misc_feature (63)..(63): Thr or Val or Ser
  misc_feature (65)..(65): Gly or Val
  misc_feature (66)..(66): Glu or Ala
  misc_feature (69)..(69): Lys or Arg
  misc_feature (70)..(70): Trp or Ile or Asn
  misc_feature (71)..(71): His or Arg
  misc_feature (73)..(73): His or Ser
  misc_feature (80)..(80): Thr or Val or Ile
  misc_feature (83)..(83): Arg or His or Gln
  misc_feature (84)..(84): His or Asn
  misc_feature (87)..(87): Val or Ser
  misc_feature (89)..(89): His or Gln or Pro
  unsure (1)..(89): unsure at all Xaa locations
MXXXXXXXXXXXXXXLLXXXXLLXXXXXXXXXXXXXXXXXXVHFKXXXXXXXXKXXXXXVXPXWXXEKXXXKXPSGPNPXGNXXPPXKX

SEQ ID NO: 36468 - protein, 89 aa, Artificial sequence; identical to SEQ ID NO: 36467
  consensus sequence of seq id no: 491 and its homologs
  misc_feature (2)..(2): Arg or Gln or Ala
  misc_feature (3)..(3): Arg or His
  misc_feature (4)..(4): His or Phe or Met
  misc_feature (5)..(5): Asp or Lys or Arg
  misc_feature (6)..(6): Absent or Pro
  misc_feature (7)..(7): Absent or Arg
  misc_feature (8)..(8): Absent or Met
  misc_feature (9)..(9): Absent or Ser
  misc_feature (10)..(10): Absent or Arg
  misc_feature (11)..(11): Absent or Leu or Gln
  misc_feature (12)..(12): Ile or Thr
  misc_feature (13)..(13): Ile or Phe
  misc_feature (14)..(14): Ile or Val
  misc_feature (15)..(15): Lys or His or Tyr
  misc_feature (18)..(18): Leu or Phe
  misc_feature (19)..(19): Leu or Ala
  misc_feature (20)..(20): Met or Trp
  misc_feature (21)..(21): Cys or Leu
  misc_feature (24)..(24): Leu or Val or Ala
  misc_feature (25)..(25): Ser or Ala
  misc_feature (26)..(26): Absent or Ser
  misc_feature (27)..(27): Absent or Gln or Ala
  misc_feature (28)..(28): Absent or Gln or Leu
  misc_feature (29)..(29): Arg or Asn
  misc_feature (30)..(30): Phe or His
  misc_feature (31)..(31): Val or Ser
  misc_feature (32)..(32): Thr or Ser
  misc_feature (33)..(33): Absent or Asn
  misc_feature (34)..(34): Absent or Ile or Ala
  misc_feature (35)..(35): Absent or Lys or Ser
  misc_feature (36)..(36): Absent or Val
  misc_feature (37)..(37): Arg or Gln
  misc_feature (38)..(38): Glu or Ala
  misc_feature (39)..(39): Cys or Val or Met
  misc_feature (40)..(40): Gln or Glu
  misc_feature (41)..(41): Glu or Ala or Ser
  misc_feature (46)..(46): Ile or Pro or Leu
  misc_feature (47)..(47): Gly or Asn or Arg
  misc_feature (48)..(48): Pro or Thr
  misc_feature (49)..(49): Ala or Leu
  misc_feature (50)..(50): Lys or Gln or Glu
  misc_feature (51)..(51): Ile or Leu or Ala
  misc_feature (52)..(52): Ile or Thr or Asn
  misc_feature (53)..(53): Ala or Ser or Pro
  misc_feature (55)..(55): Pro or Ser or Gln
  misc_feature (56)..(56): Asn or His or Gln
  misc_feature (57)..(57): Asn or Lys
  misc_feature (58)..(58): Ala or Gly
  misc_feature (59)..(59): Arg or Asn or His
  misc_feature (61)..(61): Met or Leu or Ile
  misc_feature (63)..(63): Thr or Val or Ser
  misc_feature (65)..(65): Gly or Val
  misc_feature (66)..(66): Glu or Ala
  misc_feature (69)..(69): Lys or Arg
  misc_feature (70)..(70): Trp or Ile or Asn
  misc_feature (71)..(71): His or Arg
  misc_feature (73)..(73): His or Ser
  misc_feature (80)..(80): Thr or Val or Ile
  misc_feature (83)..(83): Arg or His or Gln
  misc_feature (84)..(84): His or Asn
  misc_feature (87)..(87): Val or Ser
  misc_feature (89)..(89): His or Gln or Pro
  unsure (1)..(89): unsure at all Xaa locations

SEQ ID NO: 36469 - protein, 293 aa, Artificial sequence
  consensus sequence of seq id no: 512  and its homologs
  misc_feature (1)..(1): Absent or Met
  misc_feature (2)..(2): Absent or Asn or His or Phe
  misc_feature (3)..(3): Absent or Ser or Ala
  misc_feature (4)..(4): Absent or Ile or Leu
  misc_feature (5)..(5): Absent or Ser or Phe or Leu
  misc_feature (6)..(6): Absent or Leu or Phe or Met
  misc_feature (7)..(7): Absent or Gly or Ser or Pro or Ala
  misc_feature (8)..(8): Absent or Thr or Ser or Leu or Gly or Ala
  misc_feature (9)..(9): Absent or Phe or Ser or Thr or Ala
  misc_feature (10)..(10): Absent or Val or Ile or Pro or Leu or Ser
  misc_feature (11)..(11): Absent or Phe or Leu or Val or Ser or Thr or Ala
  misc_feature (12)..(12): Absent or Thr or Leu or Phe or Ser or Ala
  misc_feature (13)..(13): Absent or Pro or Ala or Gln or Leu or Thr
  misc_feature (14)..(14): Absent or Pro or Thr or Phe or Leu or Ser
  misc_feature (15)..(15): Absent or Pro or Ser or Leu
  misc_feature (16)..(16): Absent or Ala or Ser or Phe or Pro
  misc_feature (17)..(17): Absent or Cys or Arg or Phe or Pro or Leu
  misc_feature (18)..(18): Absent or Lys or His or Gln or Leu or Val or Ala or Gly
  misc_feature (19)..(19): Absent or Phe or Ala
  misc_feature (20)..(20): Absent or Arg or Pro or Ser or Phe or Cys
  misc_feature (21)..(21): Absent or Pro or Leu or Val or Asn or Asp or Ser
  misc_feature (22)..(22): Absent or Leu or Phe or Arg or Cys or Ser or His
  misc_feature (23)..(23): Absent or Leu or Ile or His or Arg or Ser or Phe
  misc_feature (24)..(24): Absent or Gln or Pro or Arg or Leu
  misc_feature (25)..(25): Absent or Thr or Leu or Gly or Arg or Pro
  misc_feature (26)..(26): Absent or Lys or Arg or Gln or Asn or Leu or Thr
  misc_feature (27)..(27): Absent or His or Ala or Pro or Ser
  misc_feature (28)..(28): Absent or Gln or His or Leu or Arg
  misc_feature (29)..(29): Absent or Pro or Cys or Tyr or Arg or Gln or Ile
  misc_feature (30)..(30): Absent or Ile or Tyr or Thr or Pro or Gln or Arg
  misc_feature (31)..(31): Absent or Phe or Ser or Lys or Pro
  misc_feature (32)..(32): Absent or His or Arg or Thr or Lys or Gln
  misc_feature (33)..(33): Absent or Ser or Pro
  misc_feature (34)..(34): Absent or Cys or Arg
  misc_feature (35)..(35): Absent or Val or Gly
  misc_feature (36)..(36): Absent or Gly or Asn
  misc_feature (37)..(37): Absent or His or Arg or Leu or Lys
  misc_feature (38)..(38): Absent or Arg or Cys or Leu
  misc_feature (39)..(39): Absent or Leu or Val or Ala or Gln or Thr or Asn
  misc_feature (40)..(40): Absent or Cys or His or Ser or Arg
  misc_feature (41)..(41): Absent or Ser or Tyr or Phe or Gln or Glu or Leu
  misc_feature (42)..(42): Absent or Ser or Ile or Asn or Gln
  misc_feature (43)..(43): Absent or Gly or Ser
  misc_feature (44)..(44): Absent or Leu or Tyr or Ser or His or Gln
  misc_feature (45)..(45): Absent or Thr or His or Phe or Leu or Tyr or Pro or Ser
  misc_feature (46)..(46): Absent or Leu or Arg or Ser or Pro or Phe or Gln
  misc_feature (47)..(47): Absent or Ser or Gly or His or Pro
  misc_feature (48)..(48): Absent or Arg or Pro or Asn or Leu or Ser or Ile
  misc_feature (49)..(49): Absent or Ile or Tyr or Phe or Lys or Gln or Asp or Asn
  misc_feature (50)..(50): Absent or Ser or Pro or Gln or His or Ala
  misc_feature (51)..(51): Absent or Leu or Ser or Pro or Lys or Gly
  misc_feature (52)..(52): Absent or Thr or Phe or Asn or Ser or Pro
  misc_feature (53)..(53): Absent or Gln or Pro or Ser or Thr or Phe or His or Leu
  misc_feature (54)..(54): Absent or Lys or Leu or Arg or Ser or Thr or Asn
  misc_feature (55)..(55): Absent or Pro or Leu or Tyr or Phe or Gln
  misc_feature (56)..(56): Absent or Thr or Ser or Leu
  misc_feature (57)..(57): Absent or Phe or Ser or Leu or Asp or Asn or Arg or Cys
  misc_feature (58)..(58): Absent or Leu or Ser or His or Ala or Val or Phe
  misc_feature (59)..(59): Absent or Arg or Ile or Thr or Ser
  misc_feature (60)..(60): Absent or Ala or His or Arg or Leu
  misc_feature (61)..(61): Absent or Thr or Arg or Gln or His or Tyr or Ala
  misc_feature (62)..(62): Absent or Asp or Leu or Ser or Pro or Arg or Cys
  misc_feature (63)..(63): Absent or Ser or Thr or Leu or Ala
  misc_feature (64)..(64): Absent or Asn or Val or Ile or Phe or Leu or Pro
  misc_feature (65)..(65): Absent or Thr or Ile or Gly or Ala or Ser or Cys or Pro
  misc_feature (66)..(66): Absent or Asp or Ala or Thr or Val or Cys or Ser
  misc_feature (67)..(67): Absent or Ala or Thr or Ser or Arg
  misc_feature (68)..(68): Absent or Pro or Thr or Val or Ser or Ala or Arg or Lys
  misc_feature (69)..(69): Absent or Ile or Pro or Ser or Ala
  misc_feature (70)..(70): Absent or Ser or Gly
  misc_feature (71)..(71): Absent or Leu or Asn or Pro or Arg
  misc_feature (72)..(72): Absent or Pro or Asn or Asp or Leu or Val
  misc_feature (73)..(73): Absent or Glu or Ala
  misc_feature (74)..(74): Absent or Gly or Glu or Ala
  misc_feature (75)..(75): Absent or Ala or Pro or Thr or Val or Met
  misc_feature (76)..(76): Absent or Ala or Val or Pro
  misc_feature (77)..(77): Absent or Ser or Asp
  misc_feature (78)..(78): Absent or Phe or Val or Met or Gly or Asp
  misc_feature (80)..(80): Absent or Ser or Asp or His or Asn or Ala
  misc_feature (81)..(81): Absent or Ile or Phe or Val
  misc_feature (82)..(82): Absent or Pro or Glu or Asp or Ala
  misc_feature (83)..(83): Absent or Glu or Asp or Asn
  misc_feature (84)..(84): Absent or Ile or Phe or Val
  misc_feature (85)..(85): Met or Ile or His or Val
  misc_feature (93)..(93): Glu or Asp or Asn
  misc_feature (94)..(94): Gln or Cys or Ser or Phe or Ala
  misc_feature (95)..(95): Absent or Asp or Glu or Ala
  misc_feature (96)..(96): Absent or Gly or Asp or Glu or Met or Ala
  misc_feature (97)..(97): Absent or Thr or Leu or Ser or Glu or Ala
  misc_feature (98)..(98): Absent or Asn or Ile or Thr or Ala
  misc_feature (99)..(99): Absent or Ser or Asp
  misc_feature (100)..(100): Absent or Glu or Lys or Ser
  misc_feature (101)..(101): Asn or Absent or Glu or Thr or Ala
  misc_feature (102)..(102): Ser or Ala or Glu or Absent
  misc_feature (103)..(103): Ser or Glu or His or Gln or Ala
  misc_feature (104)..(104): Asn or His or Lys or Asp or Thr or Gly
  misc_feature (105)..(105): Gly or Arg or Gln or Ser or Ala
  misc_feature (106)..(106): Lys or Asn or Thr or His or Ser
  misc_feature (107)..(107): Met or Ile or Thr or Val or Leu
  misc_feature (108)..(108): Lys or Asp or Gly or Glu or Pro or Gln
  misc_feature (110)..(110): Val or Ile or Ala
  misc_feature (111)..(111): Val or Ile or Leu
  misc_feature (112)..(112): Asp or Ala or Ser or Lys
  misc_feature (113)..(113): Ala or Ser or Lys
  misc_feature (115)..(115): Gln or Asn or Glu or Arg or Ala
  misc_feature (116)..(116): Absent or X
  misc_feature (117)..(117): Val or Ile or Leu
  misc_feature (118)..(118): Glu or Gly or Ser or Thr
  misc_feature (119)..(119): Gln or Glu or Pro
  misc_feature (120)..(120): Asn or Ser or Thr or Ala
  misc_feature (123)..(123): Absent or X
  misc_feature (126)..(126): Val or Ala
  misc_feature (127)..(127): Cys or Ser or Val or Leu
  misc_feature (128)..(128): Leu or Thr or Ile or Phe
  misc_feature (129)..(129): Gly or Ser or Pro
  misc_feature (130)..(130): Thr or Ser or Ala
  misc_feature (131)..(131): Gln or Glu or Ala or Pro or Val
  misc_feature (132)..(132): Gln or Asp or Glu or Gly or Thr or Ala or Ser
  misc_feature (136)..(136): Tyr or Thr or Ser or Gln or Arg or Ala
  misc_feature (138)..(138): Cys or Val or Ala or Leu
  misc_feature (139)..(139): Met or Gly or Asp or Glu or Ser or Ala
  misc_feature (140)..(140): Thr or Leu or Ser or Glu or Gly
  misc_feature (141)..(141): Asn or Thr or Ser or His
  misc_feature (143)..(143): Cys or Ser or Lys
  misc_feature (144)..(144): Absent or Gln or Ser or Glu
  misc_feature (147)..(147): Ser or Phe or Leu or Val
  misc_feature (148)..(148): Val or Ile or Ala
  misc_feature (149)..(149): Met or Val or Ala
  misc_feature (151)..(151): Tyr or Asp or Glu
  misc_feature (154)..(154): Leu or Phe or Tyr
  misc_feature (155)..(155): Glu or Thr or Val or Leu or Met
  misc_feature (158)..(158): Asn or Cys or Gly or Met
  misc_feature (159)..(159): Ile or Val
  misc_feature (162)..(162): Lys or Asp or Gly or Ala
  misc_feature (163)..(163): His or Tyr or X
  misc_feature (165)..(165): Ser or Arg or Lys or Gln or Glu
  misc_feature (167)..(167): Lys or Arg
  misc_feature (169)..(169): Arg or Trp or Phe
  misc_feature (170)..(170): Gln or His
  misc_feature (171)..(171): Gly or Leu
  misc_feature (173)..(173): Ile or Leu or Met or Phe or Gly
  misc_feature (174)..(174): Val or Ile or Gly
  misc_feature (175)..(175): Gly or Tyr or His or Absent
  misc_feature (176)..(176): Absent or Lys
  misc_feature (177)..(177): Absent or Gly
  misc_feature (178)..(178): Absent or Ala or Gly
  misc_feature (179)..(179): Absent or Arg or X
  misc_feature (180)..(180): Absent or Gly
  misc_feature (181)..(181): Absent or Gly
  misc_feature (182)..(182): Absent or Gly
  misc_feature (183)..(183): Absent or Val
  misc_feature (184)..(184): Absent or Arg or Val
  misc_feature (185)..(185): Absent or Arg or Glu
  misc_feature (186)..(186): Absent or Gly or Ala
  misc_feature (190)..(190): Ser or Lys or Absent or Arg
  misc_feature (191)..(191): Ser or Trp or Absent or Phe
  misc_feature (192)..(192): Pro or Ala or Thr or Ser or Absent or Asp
  misc_feature (193)..(193): Pro or Absent or Ala or Asp
  misc_feature (194)..(194): Leu or Phe or Absent
  misc_feature (196)..(196): Val or Ala or Absent
  misc_feature (199)..(199): Ile or Leu or Absent or Val
  misc_feature (200)..(200): Asn or Tyr or Absent or Cys
  misc_feature (201)..(201): Cys or Phe or Absent or Tyr
  misc_feature (202)..(202): Leu or Absent or Phe
  misc_feature (204)..(204): Ala or Val or Absent or Arg or Gly
  misc_feature (205)..(205): Leu or Absent or Arg or Met
  misc_feature (206)..(206): Asn or Ala or Pro or Absent or Gly
  misc_feature (207)..(207): His or Phe or Absent or Pro or Val
  misc_feature (208)..(208): Ser or Lys or Glu or Asp or Absent or Thr
  misc_feature (209)..(209): Leu or Absent or Gly or Ala
  misc_feature (210)..(210): Pro or Asp or His or Absent or Gly or Ala
  misc_feature (211)..(211): Arg or Gln or Glu or Absent or Gly or Ala
  misc_feature (212)..(212): Ile or Val or Leu or Absent or Gly
  misc_feature (213)..(213): Phe or Leu or Absent or Tyr
  misc_feature (214)..(214): Glu or Gly or Lys or Absent or Pro
  misc_feature (215)..(215): Ala or Ser or Glu or Thr or Absent or Pro
  misc_feature (217)..(217): Val or Ala or Ser or Absent or Gly
  misc_feature (218)..(218): Arg or Gly or Lys or Gln or Absent
  misc_feature (221)..(221): Ala or Leu or Ser or Absent or Pro
  misc_feature (222)..(222): Pro or Thr or Gln or Ser or Absent or Gly or Lys
  misc_feature (224)..(224): Ala or Gly or Absent or Thr or Arg
  misc_feature (227)..(227): Ile or Absent or Val or Gly
  misc_feature (228)..(228): Ile or Absent or Val or Gln or Met
  misc_feature (229)..(229): Ser or Absent or Phe
  misc_feature (230)..(230): Asp or His or Absent or Leu
  misc_feature (231)..(231): Thr or Pro or Trp or Leu or Absent or His or Asp
  misc_feature (235)..(235): Asp or Glu or Absent or Leu or Gly or Gln
  misc_feature (236)..(236): Gln or Val or Absent or Gly or Ser or Asn
  misc_feature (237)..(237): Leu or Absent or Cys or Phe
  misc_feature (240)..(240): His or Gln or Absent or Arg
  misc_feature (242)..(242): Lys or Absent or Arg
  misc_feature (243)..(243): Tyr or Gln or Absent or Glu or Ala
  misc_feature (244)..(244): Asn or Tyr or Absent or Phe or His
  misc_feature (245)..(245): Pro or Absent or Gln or Ser or Thr
  misc_feature (246)..(246): Asp or Absent or Thr or Glu
  misc_feature (248)..(248): Ile or Val or Absent or Leu
  misc_feature (249)..(249): Thr or Val or Absent or Ile or His
  misc_feature (250)..(250): Gly or Ser or Absent or Thr or Ala
  misc_feature (254)..(254): Asp or Absent or Asn or Thr or Ser
  misc_feature (255)..(255): Gln or Lys or Absent or Glu or Arg or Ile
  misc_feature (256)..(256): Val or Thr or Asp or Met or Ser or Absent or Pro or Ala
  misc_feature (257)..(257): Glu or Tyr or Thr or Absent or Cys or Ser or Phe
  misc_feature (259)..(259): Glu or Gln or Ser or Absent
  misc_feature (260)..(260): Lys or Ser or Asn or Absent
  misc_feature (261)..(261): Val or Absent or Ala
  misc_feature (262)..(262): Leu or Ala or Absent or Thr
  misc_feature (263)..(263): Trp or Ala or Absent or Glu or Ser
  misc_feature (264)..(264): Arg or Ala or Absent or Asp or Asn or Lys or Gly
  misc_feature (265)..(265): Tyr or His or Absent or Asn or Ser
  misc_feature (266)..(266): Pro or Ser or Absent or Lys
  misc_feature (267)..(267): Leu or Phe or Absent or Tyr
  misc_feature (268)..(268): Gln or Asp or Absent or Glu
  misc_feature (269)..(269): Leu or Val or Absent or Met or Ile
  misc_feature (270)..(270): Ile or Ala or Absent or Thr or Val or Leu
  misc_feature (271)..(271): Ser or Glu or Absent or Gln
  misc_feature (276)..(276): Ala or Pro or Absent or Gln
  misc_feature (277)..(277): Asp or Gly or Absent or Ser or Thr
  misc_feature (278)..(278): Phe or Leu or Absent
  misc_feature (284)..(284): Lys or Ile or Absent or Asn or Arg or Gln
  misc_feature (285)..(285): Val or Cys or Absent or Phe or Leu or Ser
  misc_feature (286)..(286): Cys or Ser or Absent or Arg or Gln
  misc_feature (287)..(287): Glu or Arg or Absent or Gly or Asp or Lys
  misc_feature (288)..(288): Asp or Ala or Absent or Val or Gln
  misc_feature (289)..(289): Glu or Absent or Arg
  misc_feature (290)..(290): Asn or Absent
  misc_feature (291)..(291): Ser or Absent
  misc_feature (292)..(292): Lys or Absent
  misc_feature (293)..(293): Thr or Absent or Asp
  unsure (1)..(293): unsure at all Xaa locations
XXXXXXXXXXXXXXXXXXXXXXXXXXXXXXXXXXXXXXXXXXXXXXXXXXXXXXXXXXXXXXXXXXXXXXXXXXXXXXVXXXXXXEKDWSFLXXXXXXXXXXXXXXXXRXXXXGXXXXXXSRXVLXXXXXXXFVDXLXXXXPXXLLXXXHXSLXXLAXXKEXXDXVXCXXXEXXXXXXXXXXXXXXVPEXXXXXDXVFXXXXPXXXXXXXXXXXXLXXRCXXGXRVXXXXXQGRXXXEQXRXXXXXVXXXDLPXXXXLXXXXXXXXXXXXXFVDEXXXYLAVLXXXXXXXXXX

SEQ ID NO: 36470 - protein, 906 aa, Artificial sequence
  consensus sequence of seq id no: 541 and its homologs
  misc_feature (1)..(1): Absent or Met
  misc_feature (2)..(2): Absent or Ile
  misc_feature (3)..(3): Absent or Ile
  misc_feature (4)..(4): Absent or Tyr
  misc_feature (5)..(5): Absent or Leu
  misc_feature (6)..(6): Absent or Ser
  misc_feature (7)..(7): Absent or Val
  misc_feature (8)..(8): Absent or Tyr
  misc_feature (9)..(9): Absent or Thr
  misc_feature (10)..(10): Absent or Pro
  misc_feature (11)..(11): Absent or Leu
  misc_feature (12)..(12): Absent or Tyr
  misc_feature (13)..(13): Absent or Gln
  misc_feature (14)..(14): Absent or His
  misc_feature (15)..(15): Absent or Leu or Ile
  misc_feature (16)..(16): Absent or Tyr
  misc_feature (17)..(17): Absent or Tyr or Ile
  misc_feature (18)..(18): Absent or Asn or Tyr
  misc_feature (19)..(19): Absent or Leu or Ile
  misc_feature (20)..(20): Absent or Val or Ala
  misc_feature (21)..(21): Absent or His
  misc_feature (22)..(22): Absent or Ser or Thr
  misc_feature (23)..(23): Absent or Leu
  misc_feature (24)..(24): Absent or His
  misc_feature (25)..(25): Absent or Gly
  misc_feature (26)..(26): Absent or Phe
  misc_feature (27)..(27): Absent or Leu
  misc_feature (28)..(28): Absent or Leu or Ile
  misc_feature (29)..(29): Absent or Leu
  misc_feature (30)..(30): Absent or Ser or Ile
  misc_feature (31)..(31): Absent or Lys
  misc_feature (32)..(32): Absent or Ile
  misc_feature (33)..(33): Absent or Asn
  misc_feature (34)..(34): Absent or Lys
  misc_feature (35)..(35): Absent or Leu
  misc_feature (36)..(36): Absent or Ile
  misc_feature (37)..(37): Absent or Val or Phe
  misc_feature (38)..(38): Absent or Lys or Glu
  misc_feature (39)..(39): Absent or Ser or Tyr
  misc_feature (40)..(40): Absent or Asn
  misc_feature (41)..(41): Absent or His or Pro
  misc_feature (42)..(42): Absent or Asn or Lys
  misc_feature (43)..(43): Absent or Lys
  misc_feature (44)..(44): Absent or Lys or Asn
  misc_feature (45)..(45): Absent or Ser or Leu
  misc_feature (46)..(46): Absent or Thr or Ala
  misc_feature (47)..(47): Absent or His or Ser
  misc_feature (48)..(48): Absent or Glu or Ser
  misc_feature (49)..(49): Absent or Thr or Asn
  misc_feature (50)..(50): Absent or Leu or Phe
  misc_feature (51)..(51): Absent or Val or Phe
  misc_feature (52)..(52): Absent or Arg or Lys
  misc_feature (53)..(53): Absent or Lys or Tyr
  misc_feature (54)..(54): Absent or His or Ile
  misc_feature (55)..(55): Absent or X or Ile
  misc_feature (56)..(56): Absent or Ile or Thr
  misc_feature (57)..(57): Absent or Ile or Ser
  misc_feature (58)..(58): Absent or Thr
  misc_feature (62)..(62): Gly or Absent or Ser
  misc_feature (63)..(63): Gly or Absent
  misc_feature (66)..(66): Val or Absent or Ile or Lys or Met or X or Leu
  misc_feature (68)..(68): Arg or Absent or Glu or Asp or Gln or Lys or Asn
  misc_feature (69)..(69): Asn or Absent or Lys or Ser
  misc_feature (70)..(70): Asn or Absent or Asp or Lys or Glu or His
  misc_feature (73)..(73): Met or Absent or Val or Ala or Ile or Thr
  misc_feature (79)..(79): Ala or Absent or Glu or Pro or Gly or Gln
  misc_feature (80)..(80): Absent or Ala or Thr or Val or Leu or Gly or Tyr or Gln
  misc_feature (81)..(81): Absent or Pro or Arg or Ala or Gly or Asn or Thr
  misc_feature (82)..(82): Absent or Ser or Glu or Asp or Ala or Gln or Thr
  misc_feature (83)..(83): Absent or Arg or Ser or Thr or Pro or Glu or X or Gly or Val or Ala
  misc_feature (84)..(84): Absent or Gly or Phe or Ser or Leu or Ala or Asn
  misc_feature (85)..(85): Absent or Glu
  misc_feature (86)..(86): Absent or Gln
  misc_feature (87)..(87): Absent or Lys
  misc_feature (88)..(88): Absent or Glu
  misc_feature (89)..(89): Absent or Pro
  misc_feature (90)..(90): Absent or Pro
  misc_feature (91)..(91): Absent or Ser or Ile or Leu
  misc_feature (92)..(92): Absent or Arg or Pro or Asp
  misc_feature (93)..(93): Absent or Gly or Asp or Ser or Ala or Glu or Thr
  misc_feature (94)..(94): Absent or Val or Thr or Pro or Arg or Gly or Glu or Asp or Ala or Gln or Ser
  misc_feature (95)..(95): Absent or Gly or Ala or Ser or Asn or Thr or Trp or Val
  misc_feature (96)..(96): Absent or Gly or Thr or Met or Arg or Ser or Ala
  misc_feature (97)..(97): Absent or Gly or Ala or Thr or Gln or Glu
  misc_feature (98)..(98): Absent or Gly or Pro or Ser
  misc_feature (99)..(99): Absent or Gly or Ser
  misc_feature (100)..(100): Absent or Ser
  misc_feature (101)..(101): Absent or Ser
  misc_feature (102)..(102): Absent or Gly
  misc_feature (103)..(103): Absent or Gly
  misc_feature (104)..(104): Absent or Ser or Asn
  misc_feature (105)..(105): Absent or Gln
  misc_feature (106)..(106): Absent or Gln
  misc_feature (107)..(107): Absent or Gln
  misc_feature (108)..(108): Absent or Thr or Ser or Asn or Gln or His or Arg or Pro or Val or Gly
  misc_feature (109)..(109): Thr or Absent or Gly or Ala or Val or Ser or Asn or Met or Arg
  misc_feature (113)..(113): Ala or Absent or Val or Ile
  misc_feature (116)..(116): His or Absent or Tyr
  misc_feature (117)..(117): Val or Absent or Leu or Ser or Thr
  misc_feature (119)..(119): Thr or Absent or Ser
  misc_feature (120)..(120): Ser or Absent or Asn or Gly
  misc_feature (121)..(121): Glu or Absent or Gln or Gly
  misc_feature (122)..(122): Val or Absent or Tyr or Ala or Ser or Ile
  misc_feature (123)..(123): Ile or Met or Val
  misc_feature (124)..(124): Arg or Gly or Thr or Ser or Ile
  misc_feature (127)..(127): Glu or Gln or Ser or Asp or Lys or Gly or Ala
  misc_feature (128)..(128): Ala or Val or Glu or Gln or Ser or X or Thr
  misc_feature (131)..(131): Arg or Gln or Ala or Glu or His or X or Lys or Ser
  misc_feature (132)..(132): Arg or Lys or Ile or Glu
  misc_feature (134)..(134): Gly or Ala or Arg or Ile or Phe or Tyr or Gln or Met or Lys or Thr
  misc_feature (135)..(135): Ala or Gly or Glu or Ser or Asn or Cys or Val
  misc_feature (142)..(142): Tyr or Leu or Ser or Phe
  misc_feature (143)..(143): Glu or Asn or Gly or Arg or Ala or Asp or X or Ser
  misc_feature (144)..(144): Asp or Cys or Absent or Gly or X
  misc_feature (145)..(145): Absent or Ser or X or Gly or Asp
  misc_feature (146)..(146): Absent or Gln or Asn or Gly
  misc_feature (147)..(147): Absent or Asp
  misc_feature (148)..(148): Absent or Gly
  misc_feature (149)..(149): Absent or Gly
  misc_feature (150)..(150): Absent or His or Asn or Asp or Ala or Thr or Gly
  misc_feature (151)..(151): Arg or Pro or Asn or Lys or Ser or X or Thr or Asp or Ala
  misc_feature (152)..(152): Ala or Cys or Asn or Tyr or Asp or His or Gly or Ser
  misc_feature (154)..(154): Leu or Val or Ile or Arg or Phe or Tyr
  misc_feature (156)..(156): Leu or Phe or Tyr
  misc_feature (160)..(160): Asp or Ser or Thr or Gly
  misc_feature (161)..(161): Gly or Absent or Asn or Asp or Cys
  misc_feature (162)..(162): Ser or Gly or Thr or Cys
  misc_feature (163)..(163): Ala or Val or Cys or Asn or Ile or Ser or Leu
  misc_feature (170)..(170): Arg or Asn or Val or Lys or Ala
  misc_feature (173)..(173): Ser or Ala or Arg or Thr or Asn
  misc_feature (174)..(174): Arg or Asn or Tyr or Lys or His or Ala
  misc_feature (176)..(176): Arg or Lys or Thr or X or Ser or Asn or Gly
  misc_feature (178)..(178): Thr or Val or Phe or Met or X or Ile
  misc_feature (185)..(185): Val or Leu or Ile
  misc_feature (188)..(188): Arg or His or Pro
  misc_feature (189)..(189): Asp or Asn or Ser or Glu
  misc_feature (190)..(190): His or Val or Phe or Ala or Thr or Met or Ile or Tyr or Ser
  misc_feature (192)..(192): Lys or Glu or Gln or Val or His or Arg
  misc_feature (194)..(194): Asp or Gly or Absent or Arg or Gln or Ile or Val
  misc_feature (195)..(195): Absent or Ser or Thr
  misc_feature (196)..(196): Absent or Ala or Met
  misc_feature (197)..(197): Absent or Glu or Pro
  misc_feature (198)..(198): Absent or Glu or Arg
  misc_feature (199)..(199): Absent or Arg or Lys
  misc_feature (200)..(200): Absent or Ala
  misc_feature (201)..(201): Absent or Trp
  misc_feature (202)..(202): Absent or Leu
  misc_feature (203)..(203): Absent or Arg
  misc_feature (204)..(204): Absent or Arg
  misc_feature (205)..(205): Absent or Leu
  misc_feature (206)..(206): Absent or Ser
  misc_feature (207)..(207): Absent or Ala
  misc_feature (208)..(208): Absent or Thr
  misc_feature (209)..(209): Absent or Ser
  misc_feature (210)..(210): Absent or Thr
  misc_feature (211)..(211): Absent or Ala
  misc_feature (212)..(212): Absent or Ala
  misc_feature (213)..(213): Absent or Gly
  misc_feature (214)..(214): Absent or Gly
  misc_feature (215)..(215): Absent or Gly
  misc_feature (216)..(216): Absent or Pro
  misc_feature (217)..(217): Absent or Gly
  misc_feature (218)..(218): Absent or Cys or Leu
  misc_feature (219)..(219): Absent or Gly or Ser
  misc_feature (220)..(220): Absent or Gly or Asn
  misc_feature (221)..(221): Val or Ala or Absent or Phe
  misc_feature (222)..(222): Met or Lys or Leu or Absent or Asp
  misc_feature (224)..(224): Lys or Arg or Asn or Absent or Pro or Ala or Ser or Met or Phe or Tyr or Val
  misc_feature (225)..(225): Asn or Ser or Absent or Val or His or Asp
  misc_feature (226)..(226): Absent or Gly or Ala or Asp
  misc_feature (227)..(227): Absent or Ser or Lys or Gly
  misc_feature (228)..(228): Absent or Arg or Asp or Phe
  misc_feature (229)..(229): Absent or Trp or Asp
  misc_feature (230)..(230): Absent or Asp
  misc_feature (231)..(231): Absent or Asp
  misc_feature (232)..(232): Absent or Asp
  misc_feature (233)..(233): Absent or Asp
  misc_feature (234)..(234): Absent or Ala
  misc_feature (235)..(235): Absent or Phe
  misc_feature (236)..(236): Absent or Asp
  misc_feature (237)..(237): Absent or Tyr
  misc_feature (238)..(238): Absent or Asp
  misc_feature (239)..(239): Absent or Tyr
  misc_feature (240)..(240): Absent or Asp
  misc_feature (241)..(241): Absent or Val
  misc_feature (242)..(242): Absent or Asp
  misc_feature (243)..(243): Absent or Ile
  misc_feature (244)..(244): Absent or Asp
  misc_feature (245)..(245): Absent or Glu
  misc_feature (246)..(246): Absent or His
  misc_feature (247)..(247): Absent or Glu
  misc_feature (248)..(248): Absent or Glu
  misc_feature (249)..(249): Absent or Glu
  misc_feature (250)..(250): Absent or Ala
  misc_feature (251)..(251): Absent or Ala
  misc_feature (252)..(252): Absent or Ala
  misc_feature (253)..(253): Absent or Glu
  misc_feature (254)..(254): Absent or Pro
  misc_feature (255)..(255): Absent or Lys
  misc_feature (256)..(256): Absent or Glu
  misc_feature (257)..(257): Absent or Glu
  misc_feature (258)..(258): Absent or Ile
  misc_feature (259)..(259): Absent or Ala
  misc_feature (260)..(260): Absent or Lys
  misc_feature (261)..(261): Absent or Thr
  misc_feature (262)..(262): Absent or Gln
  misc_feature (263)..(263): Absent or Gly
  misc_feature (264)..(264): Absent or Leu
  misc_feature (265)..(265): Absent or Trp
  misc_feature (266)..(266): Absent or Arg
  misc_feature (267)..(267): Absent or Cys
  misc_feature (268)..(268): Absent or Ala
  misc_feature (269)..(269): Absent or Ile
  misc_feature (270)..(270): Absent or Cys
  misc_feature (271)..(271): Absent or Thr
  misc_feature (272)..(272): Absent or Tyr
  misc_feature (273)..(273): Absent or Asp
  misc_feature (274)..(274): Absent or Asn
  misc_feature (275)..(275): Absent or Val
  misc_feature (276)..(276): Absent or Glu
  misc_feature (277)..(277): Absent or Thr
  misc_feature (278)..(278): Absent or Met
  misc_feature (279)..(279): Absent or Phe
  misc_feature (280)..(280): Absent or Val
  misc_feature (281)..(281): Absent or Cys
  misc_feature (282)..(282): Absent or Asp
  misc_feature (283)..(283): Absent or Ile
  misc_feature (284)..(284): Absent or Cys
  misc_feature (285)..(285): Absent or Gly
  misc_feature (286)..(286): Absent or Val
  misc_feature (287)..(287): Absent or Leu
  misc_feature (288)..(288): Absent or Arg
  misc_feature (289)..(289): Absent or His
  misc_feature (290)..(290): Absent or Pro
  misc_feature (291)..(291): Absent or Val
  misc_feature (292)..(292): Absent or Ala
  misc_feature (293)..(293): Absent or Gly
  misc_feature (294)..(294): Absent or Asn
  misc_feature (295)..(295): Absent or Gln
  misc_feature (296)..(296): Absent or Ser
  misc_feature (297)..(297): Absent or Ile
  misc_feature (298)..(298): Absent or Asn
  misc_feature (299)..(299): Absent or Lys
  misc_feature (300)..(300): Absent or Asn
  misc_feature (301)..(301): Absent or Thr
  misc_feature (302)..(302): Absent or Ala
  misc_feature (303)..(303): Absent or Val
  misc_feature (304)..(304): Absent or Arg
  misc_feature (305)..(305): Absent or Val
  misc_feature (306)..(306): Absent or Val
  misc_feature (307)..(307): Absent or Ser
  misc_feature (308)..(308): Absent or Leu
  misc_feature (309)..(309): Absent or Phe
  misc_feature (310)..(310): Absent or Ala
  misc_feature (311)..(311): Absent or Ile
  misc_feature (312)..(312): Absent or Val
  misc_feature (313)..(313): Absent or Val
  misc_feature (314)..(314): Absent or Leu
  misc_feature (315)..(315): Absent or Gln
  misc_feature (316)..(316): Absent or Arg
  misc_feature (317)..(317): Absent or Arg
  misc_feature (318)..(318): Absent or Tyr
  misc_feature (319)..(319): Absent or Ser
  misc_feature (320)..(320): Absent or Asp
  misc_feature (321)..(321): Absent or Ser
  misc_feature (322)..(322): Absent or Ser
  misc_feature (323)..(323): Absent or Phe
  misc_feature (324)..(324): Absent or Ser
  misc_feature (325)..(325): Absent or Thr
  misc_feature (326)..(326): Absent or Tyr
  misc_feature (327)..(327): Absent or Val
  misc_feature (328)..(328): Absent or Ala
  misc_feature (329)..(329): Absent or Pro
  misc_feature (330)..(330): Absent or Phe
  misc_feature (331)..(331): Absent or Lys
  misc_feature (332)..(332): Absent or Phe
  misc_feature (333)..(333): Absent or Asp
  misc_feature (334)..(334): Absent or Ala
  misc_feature (335)..(335): Absent or Pro
  misc_feature (336)..(336): Absent or Ser
  misc_feature (337)..(337): Absent or Pro
  misc_feature (338)..(338): Absent or Asp
  misc_feature (339)..(339): Absent or Asp
  misc_feature (340)..(340): Absent or Leu
  misc_feature (341)..(341): Absent or Val
  misc_feature (342)..(342): Absent or Ser
  misc_feature (343)..(343): Absent or Asn
  misc_feature (344)..(344): Absent or Gly
  misc_feature (345)..(345): Absent or Leu
  misc_feature (346)..(346): Absent or Thr
  misc_feature (347)..(347): Absent or Ser
  misc_feature (348)..(348): Absent or Ser
  misc_feature (349)..(349): Absent or Lys
  misc_feature (350)..(350): Absent or Thr
  misc_feature (351)..(351): Absent or Gly
  misc_feature (352)..(352): Absent or Pro
  misc_feature (353)..(353): Absent or Lys
  misc_feature (354)..(354): Absent or Gly
  misc_feature (355)..(355): Absent or Ser
  misc_feature (356)..(356): Absent or Gly
  misc_feature (357)..(357): Absent or Asp
  misc_feature (358)..(358): Absent or Ala
  misc_feature (359)..(359): Absent or Ser
  misc_feature (360)..(360): Absent or Met
  misc_feature (361)..(361): Absent or Arg
  misc_feature (362)..(362): Absent or Gln
  misc_feature (363)..(363): Absent or Lys
  misc_feature (364)..(364): Absent or Glu
  misc_feature (365)..(365): Absent or Lys
  misc_feature (366)..(366): Absent or Gln
  misc_feature (367)..(367): Absent or Asp
  misc_feature (368)..(368): Absent or Ser
  misc_feature (369)..(369): Absent or Val
  misc_feature (370)..(370): Absent or Glu
  misc_feature (371)..(371): Absent or Gln
  misc_feature (372)..(372): Absent or Lys
  misc_feature (373)..(373): Absent or Pro
  misc_feature (374)..(374): Absent or Leu
  misc_feature (375)..(375): Absent or Lys
  misc_feature (376)..(376): Absent or Lys
  misc_feature (377)..(377): Absent or Gly
  misc_feature (378)..(378): Absent or Gly
  misc_feature (379)..(379): Absent or Asp
  misc_feature (380)..(380): Absent or Ser
  misc_feature (381)..(381): Absent or Ser
  misc_feature (382)..(382): Absent or Glu
  misc_feature (383)..(383): Absent or Thr
  misc_feature (384)..(384): Absent or Ser
  misc_feature (385)..(385): Absent or Ser
  misc_feature (386)..(386): Absent or Arg
  misc_feature (387)..(387): Absent or Gly
  misc_feature (388)..(388): Absent or Arg
  misc_feature (389)..(389): Absent or His
  misc_feature (390)..(390): Absent or Asp
  misc_feature (391)..(391): Absent or Lys
  misc_feature (392)..(392): Absent or Leu
  misc_feature (393)..(393): Absent or Asp
  misc_feature (394)..(394): Absent or Asp
  misc_feature (395)..(395): Absent or Lys
  misc_feature (396)..(396): Absent or Gly
  misc_feature (397)..(397): Absent or Gly
  misc_feature (398)..(398): Absent or Ala
  misc_feature (399)..(399): Absent or Gly
  misc_feature (400)..(400): Absent or Gly
  misc_feature (401)..(401): Absent or Ile
  misc_feature (402)..(402): Absent or Lys
  misc_feature (403)..(403): Absent or Ser
  misc_feature (404)..(404): Absent or Gly
  misc_feature (405)..(405): Absent or Lys
  misc_feature (406)..(406): Absent or Ser
  misc_feature (407)..(407): Absent or Leu
  misc_feature (408)..(408): Absent or Pro
  misc_feature (409)..(409): Absent or Lys
  misc_feature (410)..(410): Absent or Ala
  misc_feature (411)..(411): Absent or Lys
  misc_feature (412)..(412): Absent or Ala
  misc_feature (413)..(413): Absent or Asp
  misc_feature (414)..(414): Absent or Met
  misc_feature (415)..(415): Absent or Ser
  misc_feature (416)..(416): Absent or Asn
  misc_feature (417)..(417): Absent or Glu
  misc_feature (418)..(418): Absent or Thr
  misc_feature (419)..(419): Absent or Ser
  misc_feature (420)..(420): Absent or Ser
  misc_feature (421)..(421): Absent or Ser
  misc_feature (422)..(422): Absent or Ser
  misc_feature (423)..(423): Absent or Lys
  misc_feature (424)..(424): Absent or Tyr
  misc_feature (425)..(425): Absent or Met
  misc_feature (426)..(426): Absent or Glu
  misc_feature (427)..(427): Absent or Thr
  misc_feature (428)..(428): Absent or Ser
  misc_feature (429)..(429): Absent or Glu
  misc_feature (430)..(430): Absent or Ser
  misc_feature (431)..(431): Absent or Leu
  misc_feature (432)..(432): Absent or Thr
  misc_feature (433)..(433): Absent or Gly
  misc_feature (434)..(434): Absent or Thr
  misc_feature (435)..(435): Absent or Met
  misc_feature (436)..(436): Absent or Asn
  misc_feature (437)..(437): Absent or Lys
  misc_feature (438)..(438): Absent or Met
  misc_feature (439)..(439): Absent or Ser
  misc_feature (440)..(440): Absent or Leu
  misc_feature (441)..(441): Absent or Ile
  misc_feature (442)..(442): Absent or Gly
  misc_feature (443)..(443): Absent or Glu
  misc_feature (444)..(444): Absent or Thr
  misc_feature (445)..(445): Absent or Glu
  misc_feature (446)..(446): Absent or Asn
  misc_feature (447)..(447): Absent or Ser
  misc_feature (448)..(448): Absent or Ser
  misc_feature (449)..(449): Absent or Asp
  misc_feature (450)..(450): Absent or Ile
  misc_feature (451)..(451): Absent or Lys
  misc_feature (452)..(452): Absent or Ile
  misc_feature (453)..(453): Absent or Arg
  misc_feature (454)..(454): Absent or Gly
  misc_feature (455)..(455): Absent or Pro
  misc_feature (456)..(456): Absent or Lys
  misc_feature (457)..(457): Absent or Ser
  misc_feature (458)..(458): Absent or Gln
  misc_feature (459)..(459): Absent or Ser
  misc_feature (460)..(460): Absent or Lys
  misc_feature (461)..(461): Absent or His
  misc_feature (462)..(462): Absent or Lys
  misc_feature (463)..(463): Absent or Pro
  misc_feature (464)..(464): Absent or Glu
  misc_feature (465)..(465): Absent or Glu
  misc_feature (466)..(466): Absent or Trp
  misc_feature (467)..(467): Absent or Met
  misc_feature (468)..(468): Absent or Leu
  misc_feature (469)..(469): Absent or Leu
  misc_feature (470)..(470): Absent or Asp
  misc_feature (471)..(471): Absent or Lys
  misc_feature (472)..(472): Absent or Glu
  misc_feature (473)..(473): Absent or Ser
  misc_feature (474)..(474): Absent or Asp
  misc_feature (475)..(475): Absent or Ala
  misc_feature (476)..(476): Absent or Leu
  misc_feature (477)..(477): Absent or Ser
  misc_feature (478)..(478): Absent or Gln
  misc_feature (479)..(479): Absent or Leu
  misc_feature (480)..(480): Absent or Asn
  misc_feature (481)..(481): Absent or Leu
  misc_feature (482)..(482): Absent or Ala
  misc_feature (483)..(483): Absent or Ile
  misc_feature (484)..(484): Absent or Val
  misc_feature (485)..(485): Absent or Gly
  misc_feature (486)..(486): Absent or His
  misc_feature (487)..(487): Absent or Val
  misc_feature (488)..(488): Absent or Asp
  misc_feature (489)..(489): Absent or Ser
  misc_feature (490)..(490): Absent or Gly
  misc_feature (491)..(491): Absent or Lys
  misc_feature (492)..(492): Absent or Ser
  misc_feature (493)..(493): Absent or Thr
  misc_feature (494)..(494): Absent or Leu
  misc_feature (495)..(495): Absent or Ser
  misc_feature (496)..(496): Absent or Gly
  misc_feature (497)..(497): Absent or Arg
  misc_feature (498)..(498): Absent or Leu
  misc_feature (499)..(499): Absent or Leu
  misc_feature (500)..(500): Absent or His
  misc_feature (501)..(501): Absent or Leu
  misc_feature (502)..(502): Absent or Leu
  misc_feature (503)..(503): Absent or Gly
  misc_feature (504)..(504): Absent or Arg
  misc_feature (505)..(505): Absent or Ile
  misc_feature (506)..(506): Absent or Ser
  misc_feature (507)..(507): Absent or Gln
  misc_feature (508)..(508): Absent or Lys
  misc_feature (509)..(509): Absent or Gln
  misc_feature (510)..(510): Absent or Met
  misc_feature (511)..(511): Absent or His
  misc_feature (512)..(512): Absent or Lys
  misc_feature (513)..(513): Absent or Tyr
  misc_feature (514)..(514): Absent or Glu
  misc_feature (515)..(515): Absent or Lys
  misc_feature (516)..(516): Absent or Glu
  misc_feature (517)..(517): Absent or Ala
  misc_feature (518)..(518): Absent or Lys
  misc_feature (519)..(519): Absent or Leu
  misc_feature (520)..(520): Absent or Gln
  misc_feature (521)..(521): Absent or Gly
  misc_feature (522)..(522): Absent or Lys
  misc_feature (523)..(523): Absent or Gly
  misc_feature (524)..(524): Absent or Ser
  misc_feature (525)..(525): Absent or Phe
  misc_feature (526)..(526): Absent or Ala
  misc_feature (527)..(527): Absent or Tyr
  misc_feature (528)..(528): Absent or Ala
  misc_feature (529)..(529): Absent or Trp
  misc_feature (530)..(530): Absent or Ala
  misc_feature (531)..(531): Absent or Leu
  misc_feature (532)..(532): Absent or Asp
  misc_feature (533)..(533): Absent or Glu
  misc_feature (534)..(534): Absent or Ser
  misc_feature (535)..(535): Absent or Ala
  misc_feature (536)..(536): Absent or Glu
  misc_feature (537)..(537): Absent or Glu
  misc_feature (538)..(538): Absent or Arg
  misc_feature (539)..(539): Absent or Glu
  misc_feature (540)..(540): Absent or Arg
  misc_feature (541)..(541): Absent or Gly
  misc_feature (542)..(542): Absent or Ile
  misc_feature (543)..(543): Absent or Thr
  misc_feature (544)..(544): Absent or Met
  misc_feature (545)..(545): Absent or Thr
  misc_feature (546)..(546): Absent or Val
  misc_feature (547)..(547): Absent or Ala
  misc_feature (548)..(548): Absent or Val
  misc_feature (549)..(549): Absent or Ala
  misc_feature (550)..(550): Absent or Tyr
  misc_feature (551)..(551): Absent or Phe
  misc_feature (552)..(552): Absent or Asn
  misc_feature (553)..(553): Absent or Ser
  misc_feature (554)..(554): Absent or Lys
  misc_feature (555)..(555): Absent or Arg
  misc_feature (556)..(556): Absent or His
  misc_feature (557)..(557): Absent or His
  misc_feature (558)..(558): Absent or Val
  misc_feature (559)..(559): Absent or Val
  misc_feature (560)..(560): Absent or Leu
  misc_feature (561)..(561): Absent or Leu
  misc_feature (562)..(562): Absent or Asp
  misc_feature (563)..(563): Absent or Ser
  misc_feature (564)..(564): Absent or Pro
  misc_feature (565)..(565): Absent or Gly
  misc_feature (566)..(566): Absent or His
  misc_feature (567)..(567): Absent or Lys
  misc_feature (568)..(568): Absent or Asp
  misc_feature (569)..(569): Absent or Phe
  misc_feature (570)..(570): Absent or Val
  misc_feature (571)..(571): Absent or Pro
  misc_feature (572)..(572): Absent or Asn
  misc_feature (573)..(573): Absent or Met
  misc_feature (574)..(574): Absent or Ile
  misc_feature (575)..(575): Absent or Ala
  misc_feature (576)..(576): Absent or Gly
  misc_feature (577)..(577): Absent or Ala
  misc_feature (578)..(578): Absent or Thr
  misc_feature (579)..(579): Absent or Gln
  misc_feature (580)..(580): Absent or Ala
  misc_feature (581)..(581): Absent or Asp
  misc_feature (582)..(582): Absent or Ala
  misc_feature (583)..(583): Absent or Ala
  misc_feature (584)..(584): Absent or Ile
  misc_feature (585)..(585): Absent or Leu
  misc_feature (586)..(586): Absent or Val
  misc_feature (587)..(587): Absent or Ile
  misc_feature (588)..(588): Absent or Asp
  misc_feature (589)..(589): Absent or Ala
  misc_feature (590)..(590): Absent or Ser
  misc_feature (591)..(591): Absent or Val
  misc_feature (592)..(592): Absent or Gly
  misc_feature (593)..(593): Absent or Ala
  misc_feature (594)..(594): Absent or Phe
  misc_feature (595)..(595): Absent or Glu
  misc_feature (596)..(596): Absent or Ala
  misc_feature (597)..(597): Absent or Gly
  misc_feature (598)..(598): Absent or Phe
  misc_feature (599)..(599): Absent or Asp
  misc_feature (600)..(600): Absent or Asn
  misc_feature (601)..(601): Absent or Leu
  misc_feature (602)..(602): Absent or Lys
  misc_feature (603)..(603): Absent or Gly
  misc_feature (604)..(604): Absent or Gln
  misc_feature (605)..(605): Absent or Thr
  misc_feature (606)..(606): Absent or Arg
  misc_feature (607)..(607): Absent or Glu
  misc_feature (608)..(608): Absent or His
  misc_feature (609)..(609): Absent or Ala
  misc_feature (610)..(610): Absent or Arg
  misc_feature (611)..(611): Absent or Val
  misc_feature (612)..(612): Absent or Leu
  misc_feature (613)..(613): Absent or Arg
  misc_feature (614)..(614): Absent or Gly
  misc_feature (615)..(615): Absent or Phe
  misc_feature (616)..(616): Absent or Gly
  misc_feature (617)..(617): Absent or Val
  misc_feature (618)..(618): Absent or Glu
  misc_feature (619)..(619): Absent or Gln
  misc_feature (620)..(620): Absent or Val
  misc_feature (621)..(621): Absent or Ile
  misc_feature (622)..(622): Absent or Val
  misc_feature (623)..(623): Absent or Ala
  misc_feature (624)..(624): Absent or Ile
  misc_feature (625)..(625): Absent or Asn
  misc_feature (626)..(626): Absent or Lys
  misc_feature (627)..(627): Absent or Met
  misc_feature (628)..(628): Absent or Asp
  misc_feature (629)..(629): Absent or Ile
  misc_feature (630)..(630): Absent or Val
  misc_feature (631)..(631): Absent or Gly
  misc_feature (632)..(632): Absent or Tyr
  misc_feature (633)..(633): Absent or Ser
  misc_feature (634)..(634): Absent or Lys
  misc_feature (635)..(635): Absent or Glu
  misc_feature (636)..(636): Absent or Arg
  misc_feature (637)..(637): Absent or Phe
  misc_feature (638)..(638): Absent or Asp
  misc_feature (639)..(639): Absent or Leu
  misc_feature (640)..(640): Absent or Ile
  misc_feature (641)..(641): Absent or Lys
  misc_feature (642)..(642): Absent or Gln
  misc_feature (643)..(643): Absent or His
  misc_feature (644)..(644): Absent or Val
  misc_feature (645)..(645): Absent or Gly
  misc_feature (646)..(646): Absent or Ser
  misc_feature (647)..(647): Absent or Phe
  misc_feature (648)..(648): Absent or Leu
  misc_feature (649)..(649): Absent or Gln
  misc_feature (650)..(650): Absent or Ser
  misc_feature (651)..(651): Absent or Cys
  misc_feature (652)..(652): Absent or Arg
  misc_feature (653)..(653): Absent or Phe
  misc_feature (654)..(654): Absent or Lys
  misc_feature (655)..(655): Absent or Asp
  misc_feature (656)..(656): Absent or Ser
  misc_feature (657)..(657): Absent or Ser
  misc_feature (658)..(658): Absent or Leu
  misc_feature (659)..(659): Absent or Thr
  misc_feature (660)..(660): Absent or Trp
  misc_feature (661)..(661): Absent or Ile
  misc_feature (662)..(662): Absent or Pro
  misc_feature (663)..(663): Absent or Leu
  misc_feature (664)..(664): Absent or Ser
  misc_feature (665)..(665): Absent or Ala
  misc_feature (666)..(666): Absent or Met
  misc_feature (667)..(667): Absent or Glu
  misc_feature (668)..(668): Absent or Asn
  misc_feature (669)..(669): Absent or Gln
  misc_feature (670)..(670): Absent or Asn
  misc_feature (671)..(671): Absent or Leu
  misc_feature (672)..(672): Absent or Val
  misc_feature (673)..(673): Absent or Ala
  misc_feature (674)..(674): Absent or Ala
  misc_feature (675)..(675): Absent or Pro
  misc_feature (676)..(676): Absent or Ser
  misc_feature (677)..(677): Absent or Asp
  misc_feature (678)..(678): Absent or Asn
  misc_feature (679)..(679): Absent or Arg
  misc_feature (680)..(680): Absent or Leu
  misc_feature (681)..(681): Absent or Ser
  misc_feature (682)..(682): Absent or Ser
  misc_feature (683)..(683): Absent or Trp
  misc_feature (684)..(684): Absent or Tyr
  misc_feature (685)..(685): Absent or Gln
  misc_feature (686)..(686): Absent or Gly
  misc_feature (687)..(687): Absent or Pro
  misc_feature (688)..(688): Absent or Cys
  misc_feature (689)..(689): Absent or Leu
  misc_feature (690)..(690): Absent or Leu
  misc_feature (691)..(691): Absent or Asp
  misc_feature (692)..(692): Absent or Ala
  misc_feature (693)..(693): Absent or Val
  misc_feature (694)..(694): Absent or Asp
  misc_feature (695)..(695): Absent or Ser
  misc_feature (696)..(696): Absent or Val
  misc_feature (697)..(697): Absent or Lys
  misc_feature (698)..(698): Absent or Ser
  misc_feature (699)..(699): Absent or Pro
  misc_feature (700)..(700): Absent or Asp
  misc_feature (701)..(701): Absent or Arg
  misc_feature (702)..(702): Absent or Asp
  misc_feature (703)..(703): Absent or Val
  misc_feature (704)..(704): Absent or Ser
  misc_feature (705)..(705): Absent or Lys
  misc_feature (706)..(706): Absent or Pro
  misc_feature (707)..(707): Absent or Leu
  misc_feature (708)..(708): Absent or Leu
  misc_feature (709)..(709): Absent or Met
  misc_feature (710)..(710): Absent or Pro
  misc_feature (711)..(711): Absent or Ile
  misc_feature (712)..(712): Absent or Cys
  misc_feature (713)..(713): Absent or Asp
  misc_feature (714)..(714): Absent or Ala
  misc_feature (715)..(715): Absent or Val
  misc_feature (716)..(716): Absent or Arg
  misc_feature (717)..(717): Absent or Ser
  misc_feature (718)..(718): Absent or Thr
  misc_feature (719)..(719): Absent or Ser
  misc_feature (720)..(720): Absent or Gln
  misc_feature (721)..(721): Absent or Gly
  misc_feature (722)..(722): Absent or Gln
  misc_feature (723)..(723): Absent or Val
  misc_feature (724)..(724): Absent or Ser
  misc_feature (725)..(725): Absent or Ala
  misc_feature (726)..(726): Absent or Cys
  misc_feature (727)..(727): Absent or Gly
  misc_feature (728)..(728): Absent or Lys
  misc_feature (729)..(729): Absent or Leu
  misc_feature (730)..(730): Absent or Glu
  misc_feature (731)..(731): Absent or Ala
  misc_feature (732)..(732): Absent or Gly
  misc_feature (733)..(733): Absent or Ala
  misc_feature (734)..(734): Absent or Val
  misc_feature (735)..(735): Absent or Arg
  misc_feature (736)..(736): Absent or Pro
  misc_feature (737)..(737): Absent or Gly
  misc_feature (738)..(738): Absent or Ser
  misc_feature (739)..(739): Absent or Lys
  misc_feature (740)..(740): Absent or Val
  misc_feature (741)..(741): Absent or Met
  misc_feature (742)..(742): Absent or Val
  misc_feature (743)..(743): Absent or Met
  misc_feature (744)..(744): Absent or Pro
  misc_feature (745)..(745): Absent or Ser
  misc_feature (746)..(746): Absent or Gly
  misc_feature (747)..(747): Absent or Asp
  misc_feature (748)..(748): Absent or Gln
  misc_feature (749)..(749): Absent or Gly
  misc_feature (750)..(750): Absent or Thr
  misc_feature (751)..(751): Absent or Ile
  misc_feature (752)..(752): Absent or Arg
  misc_feature (753)..(753): Absent or Ser
  misc_feature (754)..(754): Absent or Leu
  misc_feature (755)..(755): Absent or Glu
  misc_feature (756)..(756): Absent or Arg
  misc_feature (757)..(757): Absent or Asp
  misc_feature (758)..(758): Absent or Ser
  misc_feature (759)..(759): Absent or Gln
  misc_feature (760)..(760): Absent or Ala
  misc_feature (761)..(761): Absent or Cys
  misc_feature (762)..(762): Absent or Thr
  misc_feature (763)..(763): Absent or Ile
  misc_feature (764)..(764): Absent or Ala
  misc_feature (765)..(765): Absent or Arg
  misc_feature (766)..(766): Absent or Ala
  misc_feature (767)..(767): Absent or Gly
  misc_feature (768)..(768): Absent or Asp
  misc_feature (769)..(769): Absent or Asn
  misc_feature (770)..(770): Absent or Val
  misc_feature (771)..(771): Absent or Ala
  misc_feature (772)..(772): Absent or Leu
  misc_feature (773)..(773): Absent or Ala
  misc_feature (774)..(774): Absent or Leu
  misc_feature (775)..(775): Absent or Gln
  misc_feature (776)..(776): Absent or Gly
  misc_feature (777)..(777): Absent or Ile
  misc_feature (778)..(778): Absent or Asp
  misc_feature (779)..(779): Absent or Ala
  misc_feature (780)..(780): Absent or Asn
  misc_feature (781)..(781): Absent or Gln
  misc_feature (782)..(782): Absent or Val
  misc_feature (783)..(783): Absent or Met
  misc_feature (784)..(784): Absent or Ala
  misc_feature (785)..(785): Absent or Gly
  misc_feature (786)..(786): Absent or Asp
  misc_feature (787)..(787): Absent or Val
  misc_feature (788)..(788): Absent or Leu
  misc_feature (789)..(789): Absent or Cys
  misc_feature (790)..(790): Absent or His
  misc_feature (791)..(791): Absent or Pro
  misc_feature (792)..(792): Absent or Asp
  misc_feature (793)..(793): Absent or Phe
  misc_feature (794)..(794): Absent or Pro
  misc_feature (795)..(795): Absent or Val
  misc_feature (796)..(796): Absent or Ser
  misc_feature (797)..(797): Absent or Val
  misc_feature (798)..(798): Absent or Ala
  misc_feature (799)..(799): Absent or Thr
  misc_feature (800)..(800): Absent or His
  misc_feature (801)..(801): Absent or Leu
  misc_feature (802)..(802): Absent or Glu
  misc_feature (803)..(803): Absent or Leu
  misc_feature (804)..(804): Absent or Met
  misc_feature (805)..(805): Absent or Val
  misc_feature (806)..(806): Absent or Leu
  misc_feature (807)..(807): Absent or Val
  misc_feature (808)..(808): Absent or Leu
  misc_feature (809)..(809): Absent or Glu
  misc_feature (810)..(810): Absent or Gly
  misc_feature (811)..(811): Absent or Ala
  misc_feature (812)..(812): Absent or Thr
  misc_feature (813)..(813): Absent or Pro
  misc_feature (814)..(814): Absent or Ile
  misc_feature (815)..(815): Absent or Leu
  misc_feature (816)..(816): Absent or Leu
  misc_feature (817)..(817): Absent or Gly
  misc_feature (818)..(818): Absent or Ser
  misc_feature (819)..(819): Absent or Gln
  misc_feature (820)..(820): Absent or Leu
  misc_feature (821)..(821): Absent or Glu
  misc_feature (822)..(822): Absent or Phe
  misc_feature (823)..(823): Absent or His
  misc_feature (824)..(824): Absent or Val
  misc_feature (825)..(825): Absent or His
  misc_feature (826)..(826): Absent or His
  misc_feature (827)..(827): Absent or Ala
  misc_feature (828)..(828): Absent or Lys
  misc_feature (829)..(829): Absent or Glu
  misc_feature (830)..(830): Absent or Ala
  misc_feature (831)..(831): Absent or Ala
  misc_feature (832)..(832): Absent or Thr
  misc_feature (833)..(833): Absent or Val
  misc_feature (834)..(834): Absent or Val
  misc_feature (835)..(835): Absent or Lys
  misc_feature (836)..(836): Absent or Leu
  misc_feature (837)..(837): Absent or Val
  misc_feature (838)..(838): Absent or Ala
  misc_feature (839)..(839): Absent or Met
  misc_feature (840)..(840): Absent or Leu
  misc_feature (841)..(841): Absent or Asp
  misc_feature (842)..(842): Absent or Pro
  misc_feature (843)..(843): Absent or Lys
  misc_feature (844)..(844): Absent or Thr
  misc_feature (845)..(845): Absent or Gly
  misc_feature (846)..(846): Absent or Gln
  misc_feature (847)..(847): Absent or Pro
  misc_feature (848)..(848): Absent or Thr
  misc_feature (849)..(849): Absent or Lys
  misc_feature (850)..(850): Absent or Lys
  misc_feature (851)..(851): Absent or Ser
  misc_feature (852)..(852): Absent or Pro
  misc_feature (853)..(853): Absent or Arg
  misc_feature (854)..(854): Absent or Cys
  misc_feature (855)..(855): Absent or Leu
  misc_feature (856)..(856): Absent or Thr
  misc_feature (857)..(857): Absent or Ala
  misc_feature (858)..(858): Absent or Lys
  misc_feature (859)..(859): Absent or Gln
  misc_feature (860)..(860): Absent or Ser
  misc_feature (861)..(861): Absent or Ala
  misc_feature (862)..(862): Absent or Met
  misc_feature (863)..(863): Absent or Leu
  misc_feature (864)..(864): Absent or Glu
  misc_feature (865)..(865): Absent or Val
  misc_feature (866)..(866): Absent or Ser
  misc_feature (867)..(867): Absent or Leu
  misc_feature (868)..(868): Absent or Gln
  misc_feature (869)..(869): Absent or Asn
  misc_feature (870)..(870): Absent or Pro
  misc_feature (871)..(871): Absent or Val
  misc_feature (872)..(872): Absent or Cys
  misc_feature (873)..(873): Absent or Val
  misc_feature (874)..(874): Absent or Glu
  misc_feature (875)..(875): Absent or Thr
  misc_feature (876)..(876): Absent or Phe
  misc_feature (877)..(877): Absent or Ser
  misc_feature (878)..(878): Absent or Glu
  misc_feature (879)..(879): Absent or Ser
  misc_feature (880)..(880): Absent or Arg
  misc_feature (881)..(881): Absent or Ala
  misc_feature (882)..(882): Absent or Leu
  misc_feature (883)..(883): Absent or Gly
  misc_feature (884)..(884): Absent or Arg
  misc_feature (885)..(885): Absent or Val
  misc_feature (886)..(886): Absent or Phe
  misc_feature (887)..(887): Absent or Leu
  misc_feature (888)..(888): Absent or Arg
  misc_feature (889)..(889): Absent or Ser
  misc_feature (890)..(890): Absent or Ser
  misc_feature (891)..(891): Absent or Gly
  misc_feature (892)..(892): Absent or Arg
  misc_feature (893)..(893): Absent or Thr
  misc_feature (894)..(894): Absent or Val
  misc_feature (895)..(895): Absent or Ala
  misc_feature (896)..(896): Absent or Met
  misc_feature (897)..(897): Absent or Gly
  misc_feature (898)..(898): Absent or Lys
  misc_feature (899)..(899): Absent or Val
  misc_feature (900)..(900): Absent or Thr
  misc_feature (901)..(901): Absent or Arg
  misc_feature (902)..(902): Absent or Ile
  misc_feature (903)..(903): Absent or Ile
  misc_feature (904)..(904): Absent or Gln
  misc_feature (905)..(905): Absent or Asp
  misc_feature (906)..(906): Absent or Ser
  unsure (1)..(906): unsure at all Xaa locations
XXXXXXXXXXXXXXXXXXXXXXXXXXXXXXXXXXXXXXXXXXXXXXXXXXXXXXXXXXMSGXXVWXFXXXGVXRLVENXXXXXXXXXXXXXXXXXXXXXXXXXXXXXXXRRKXLVXXPXXXXXXSYXXLEXXLXXLGWERYXXXXXXXXXXXLXQXHKRXXXXDLISLPXDFXXFXSXHMYDIVXKNXXXFXVXXXXXXXXXXXXXXXXXXXXXXXXXXXXXDXXXXXXXXXXXXXXXXXXXXXXXXXXXXXXXXXXXXXXXXXXXXXXXXXXXXXXXXXXXXXXXXXXXXXXXXXXXXXXXXXXXXXXXXXXXXXXXXXXXXXXXXXXXXXXXXXXXXXXXXXXXXXXXXXXXXXXXXXXXXXXXXXXXXXXXXXXXXXXXXXXXXXXXXXXXXXXXXXXXXXXXXXXXXXXXXXXXXXXXXXXXXXXXXXXXXXXXXXXXXXXXXXXXXXXXXXXXXXXXXXXXXXXXXXXXXXXXXXXXXXXXXXXXXXXXXXXXXXXXXXXXXXXXXXXXXXXXXXXXXXXXXXXXXXXXXXXXXXXXXXXXXXXXXXXXXXXXXXXXXXXXXXXXXXXXXXXXXXXXXXXXXXXXXXXXXXXXXXXXXXXXXXXXXXXXXXXXXXXXXXXXXXXXXXXXXXXXXXXXXXXXXXXXXXXXXXXXXXXXXXXXXXXXXXXXXXXXXXXXXXXXXXXXXXXXXXXXXXXXXXXXXXXXXXXXXXXXXXXXXXXXXXXXXXXXXXXXXXXXXXXXXXXXXXXXXXXXXXXXXXXXXXXXXXXXXXXXXXXXXXXXXXXXXXXXXXXXXXXXXXXXXXXXXXXXXXXXXXXXXXXXXXXXXXXXXXXXXXXXXXXXXXXXXXXXXXXXXXXXXXXXXXXXXXXXXXXXXXXXXXXXXXXXXXXXXXXXXXXXXXXX

SEQ ID NO: 36471 - protein, 910 aa, Artificial sequence
  consensus sequence of seq id no: 543  and its homologs
  misc_feature (1)..(1): Absent or Met
  misc_feature (2)..(2): Absent or Trp
  misc_feature (3)..(3): Absent or Lys
  misc_feature (4)..(4): Absent or Leu
  misc_feature (5)..(5): Absent or Thr
  misc_feature (6)..(6): Absent or Arg
  misc_feature (7)..(7): Absent or Arg
  misc_feature (8)..(8): Absent or Leu
  misc_feature (9)..(9): Absent or Gln
  misc_feature (10)..(10): Absent or Pro
  misc_feature (11)..(11): Absent or His
  misc_feature (12)..(12): Absent or Ile
  misc_feature (13)..(13): Absent or Asn
  misc_feature (14)..(14): Absent or Ser
  misc_feature (15)..(15): Absent or Thr
  misc_feature (16)..(16): Absent or Arg
  misc_feature (17)..(17): Absent or Trp
  misc_feature (18)..(18): Absent or Leu
  misc_feature (19)..(19): Absent or Val
  misc_feature (20)..(20): Absent or Arg
  misc_feature (21)..(21): Absent or Asn
  misc_feature (22)..(22): Absent or Phe
  misc_feature (23)..(23): Absent or Arg
  misc_feature (24)..(24): Absent or Asn
  misc_feature (25)..(25): Absent or Gly
  misc_feature (26)..(26): Absent or Gly
  misc_feature (27)..(27): Absent or Ala
  misc_feature (28)..(28): Absent or Gly
  misc_feature (29)..(29): Absent or Asp
  misc_feature (30)..(30): Absent or Ala
  misc_feature (31)..(31): Absent or Thr
  misc_feature (32)..(32): Absent or Gly
  misc_feature (33)..(33): Absent or Leu
  misc_feature (34)..(34): Absent or Tyr
  misc_feature (35)..(35): Absent or Gly
  misc_feature (36)..(36): Absent or Phe
  misc_feature (37)..(37): Absent or Asp
  misc_feature (38)..(38): Absent or His
  misc_feature (39)..(39): Absent or Leu
  misc_feature (40)..(40): Absent or Lys
  misc_feature (41)..(41): Absent or Thr
  misc_feature (42)..(42): Absent or Ala
  misc_feature (43)..(43): Absent or Lys
  misc_feature (44)..(44): Absent or Gly
  misc_feature (45)..(45): Absent or Phe
  misc_feature (46)..(46): Absent or Gln
  misc_feature (47)..(47): Absent or Arg
  misc_feature (48)..(48): Absent or Phe
  misc_feature (49)..(49): Absent or Val
  misc_feature (50)..(50): Absent or Ala
  misc_feature (51)..(51): Absent or Asp
  misc_feature (52)..(52): Absent or Ala
  misc_feature (53)..(53): Absent or Ile
  misc_feature (54)..(54): Absent or Glu
  misc_feature (55)..(55): Absent or Arg
  misc_feature (56)..(56): Absent or Ser
  misc_feature (57)..(57): Absent or Gly
  misc_feature (58)..(58): Absent or Glu
  misc_feature (59)..(59): Absent or Leu
  misc_feature (60)..(60): Absent or Val
  misc_feature (61)..(61): Absent or Ser
  misc_feature (62)..(62): Absent or Tyr
  misc_feature (63)..(63): Absent or Ile
  misc_feature (64)..(64): Absent or Ser
  misc_feature (65)..(65): Absent or Gly
  misc_feature (66)..(66): Absent or Met
  misc_feature (67)..(67): Absent or Pro
  misc_feature (68)..(68): Absent or Ser
  misc_feature (69)..(69): Absent or Ser
  misc_feature (70)..(70): Absent or Pro
  misc_feature (71)..(71): Absent or Glu
  misc_feature (72)..(72): Absent or Ile
  misc_feature (73)..(73): Absent or Ile
  misc_feature (74)..(74): Absent or Lys
  misc_feature (75)..(75): Absent or Ala
  misc_feature (76)..(76): Absent or Met
  misc_feature (77)..(77): Absent or Asp
  misc_feature (78)..(78): Absent or Glu
  misc_feature (79)..(79): Absent or Ile
  misc_feature (80)..(80): Absent or Ser
  misc_feature (81)..(81): Absent or Asp
  misc_feature (82)..(82): Absent or Thr
  misc_feature (83)..(83): Absent or Val
  misc_feature (84)..(84): Absent or Cys
  misc_feature (85)..(85): Absent or Cys
  misc_feature (86)..(86): Absent or Val
  misc_feature (87)..(87): Absent or Val
  misc_feature (88)..(88): Absent or Asp
  misc_feature (89)..(89): Absent or Ser
  misc_feature (90)..(90): Absent or Ala
  misc_feature (91)..(91): Absent or Glu
  misc_feature (92)..(92): Absent or Leu
  misc_feature (93)..(93): Absent or Cys
  misc_feature (94)..(94): Absent or Arg
  misc_feature (95)..(95): Absent or Gln
  misc_feature (96)..(96): Absent or Thr
  misc_feature (97)..(97): Absent or His
  misc_feature (98)..(98): Absent or Pro
  misc_feature (99)..(99): Absent or Asp
  misc_feature (100)..(100): Absent or Arg
  misc_feature (101)..(101): Absent or Glu
  misc_feature (102)..(102): Absent or Phe
  misc_feature (103)..(103): Absent or Val
  misc_feature (104)..(104): Absent or Glu
  misc_feature (105)..(105): Absent or Glu
  misc_feature (106)..(106): Absent or Ala
  misc_feature (107)..(107): Absent or Asn
  misc_feature (108)..(108): Absent or Lys
  misc_feature (109)..(109): Absent or Ala
  misc_feature (110)..(110): Absent or Ala
  misc_feature (111)..(111): Absent or Ile
  misc_feature (112)..(112): Absent or Glu
  misc_feature (113)..(113): Absent or Met
  misc_feature (114)..(114): Absent or Asn
  misc_feature (115)..(115): Absent or Asp
  misc_feature (116)..(116): Absent or Tyr
  misc_feature (117)..(117): Absent or Leu
  misc_feature (118)..(118): Absent or His
  misc_feature (119)..(119): Absent or His
  misc_feature (120)..(120): Absent or Leu
  misc_feature (121)..(121): Absent or Asn
  misc_feature (122)..(122): Absent or Thr
  misc_feature (123)..(123): Absent or Asn
  misc_feature (124)..(124): Absent or His
  misc_feature (125)..(125): Absent or Thr
  misc_feature (126)..(126): Absent or Leu
  misc_feature (127)..(127): Absent or Tyr
  misc_feature (128)..(128): Absent or Ala
  misc_feature (129)..(129): Absent or Ala
  misc_feature (130)..(130): Absent or Val
  misc_feature (131)..(131): Absent or Lys
  misc_feature (132)..(132): Absent or Lys
  misc_feature (133)..(133): Absent or Ala
  misc_feature (134)..(134): Absent or Glu
  misc_feature (135)..(135): Absent or Gln
  misc_feature (136)..(136): Absent or Asp
  misc_feature (137)..(137): Absent or Ser
  misc_feature (138)..(138): Absent or Asn
  misc_feature (139)..(139): Absent or Leu
  misc_feature (140)..(140): Absent or Leu
  misc_feature (141)..(141): Absent or Thr
  misc_feature (142)..(142): Absent or Lys
  misc_feature (143)..(143): Absent or Glu
  misc_feature (144)..(144): Absent or Ala
  misc_feature (145)..(145): Absent or Ser
  misc_feature (146)..(146): Absent or Arg
  misc_feature (147)..(147): Absent or Thr
  misc_feature (148)..(148): Absent or Ala
  misc_feature (149)..(149): Absent or His
  misc_feature (150)..(150): Absent or His
  misc_feature (151)..(151): Absent or Leu
  misc_feature (152)..(152): Absent or Arg
  misc_feature (153)..(153): Absent or Met
  misc_feature (154)..(154): Absent or Asp
  misc_feature (155)..(155): Absent or Phe
  misc_feature (156)..(156): Absent or Glu
  misc_feature (157)..(157): Absent or Arg
  misc_feature (158)..(158): Absent or Gly
  misc_feature (159)..(159): Absent or Gly
  misc_feature (160)..(160): Absent or Ile
  misc_feature (161)..(161): Absent or His
  misc_feature (162)..(162): Absent or Leu
  misc_feature (163)..(163): Absent or Asp
  misc_feature (164)..(164): Absent or Pro
  misc_feature (165)..(165): Absent or Glu
  misc_feature (166)..(166): Absent or Lys
  misc_feature (167)..(167): Absent or Leu
  misc_feature (168)..(168): Absent or Asp
  misc_feature (169)..(169): Absent or Lys
  misc_feature (170)..(170): Absent or Val
  misc_feature (171)..(171): Absent or Asn
  misc_feature (172)..(172): Absent or Asn
  misc_feature (173)..(173): Absent or Leu
  misc_feature (174)..(174): Absent or Thr
  misc_feature (175)..(175): Absent or Thr
  misc_feature (176)..(176): Absent or Asn
  misc_feature (177)..(177): Absent or Ile
  misc_feature (178)..(178): Absent or Phe
  misc_feature (179)..(179): Absent or Gln
  misc_feature (180)..(180): Absent or Leu
  misc_feature (181)..(181): Absent or Cys
  misc_feature (182)..(182): Absent or Arg
  misc_feature (183)..(183): Absent or Glu
  misc_feature (184)..(184): Absent or Phe
  misc_feature (185)..(185): Absent or Ser
  misc_feature (186)..(186): Absent or Glu
  misc_feature (187)..(187): Absent or Asn
  misc_feature (188)..(188): Absent or Ile
  misc_feature (189)..(189): Absent or Ala
  misc_feature (190)..(190): Absent or Asp
  misc_feature (191)..(191): Absent or Asp
  misc_feature (192)..(192): Absent or Pro
  misc_feature (193)..(193): Absent or Gly
  misc_feature (194)..(194): Absent or His
  misc_feature (195)..(195): Absent or Val
  misc_feature (196)..(196): Absent or Asp
  misc_feature (197)..(197): Absent or Ile
  misc_feature (198)..(198): Absent or Phe
  misc_feature (199)..(199): Absent or Pro
  misc_feature (200)..(200): Absent or Gly
  misc_feature (201)..(201): Absent or Ser
  misc_feature (202)..(202): Absent or Arg
  misc_feature (203)..(203): Absent or Ile
  misc_feature (204)..(204): Absent or Pro
  misc_feature (205)..(205): Absent or Arg
  misc_feature (206)..(206): Absent or His
  misc_feature (207)..(207): Absent or Leu
  misc_feature (208)..(208): Absent or His
  misc_feature (209)..(209): Absent or His
  misc_feature (210)..(210): Absent or Leu
  misc_feature (211)..(211): Absent or Leu
  misc_feature (212)..(212): Absent or Asn
  misc_feature (213)..(213): Absent or Pro
  misc_feature (214)..(214): Absent or Thr
  misc_feature (215)..(215): Absent or Tyr
  misc_feature (216)..(216): Absent or Arg
  misc_feature (217)..(217): Absent or Ser
  misc_feature (218)..(218): Absent or Thr
  misc_feature (219)..(219): Absent or Ser
  misc_feature (220)..(220): Absent or Gly
  misc_feature (221)..(221): Absent or Gly
  misc_feature (222)..(222): Absent or Ser
  misc_feature (223)..(223): Absent or Arg
  misc_feature (224)..(224): Absent or Gly
  misc_feature (225)..(225): Absent or Ser
  misc_feature (226)..(226): Absent or Thr
  misc_feature (227)..(227): Absent or Arg
  misc_feature (228)..(228): Absent or Ser
  misc_feature (229)..(229): Absent or Ala
  misc_feature (230)..(230): Absent or His
  misc_feature (231)..(231): Absent or Lys
  misc_feature (232)..(232): Absent or Ser
  misc_feature (233)..(233): Absent or Lys
  misc_feature (234)..(234): Absent or Gln
  misc_feature (235)..(235): Absent or Lys
  misc_feature (236)..(236): Absent or Gly
  misc_feature (237)..(237): Absent or Phe
  misc_feature (238)..(238): Absent or Arg
  misc_feature (239)..(239): Absent or Ile
  misc_feature (240)..(240): Absent or Asn
  misc_feature (241)..(241): Absent or Thr
  misc_feature (242)..(242): Absent or Asp
  misc_feature (243)..(243): Absent or Pro
  misc_feature (244)..(244): Absent or Arg
  misc_feature (245)..(245): Absent or Thr
  misc_feature (246)..(246): Absent or Val
  misc_feature (247)..(247): Absent or Ser
  misc_feature (248)..(248): Absent or Ser
  misc_feature (249)..(249): Absent or Ile
  misc_feature (250)..(250): Absent or Leu
  misc_feature (251)..(251): Absent or Gln
  misc_feature (252)..(252): Absent or Trp
  misc_feature (253)..(253): Absent or Thr
  misc_feature (254)..(254): Absent or Ser
  misc_feature (255)..(255): Absent or Asp
  misc_feature (256)..(256): Absent or Glu
  misc_feature (257)..(257): Absent or Glu
  misc_feature (258)..(258): Absent or Val
  misc_feature (259)..(259): Absent or Arg
  misc_feature (260)..(260): Absent or Lys
  misc_feature (261)..(261): Absent or Met
  misc_feature (262)..(262): Absent or Val
  misc_feature (263)..(263): Absent or Tyr
  misc_feature (264)..(264): Absent or Ile
  misc_feature (265)..(265): Absent or Gln
  misc_feature (266)..(266): Absent or Gly
  misc_feature (267)..(267): Absent or Asn
  misc_feature (268)..(268): Absent or Ser
  misc_feature (269)..(269): Absent or Val
  misc_feature (270)..(270): Absent or Pro
  misc_feature (271)..(271): Absent or His
  misc_feature (272)..(272): Absent or Ala
  misc_feature (273)..(273): Absent or Asn
  misc_feature (274)..(274): Absent or His
  misc_feature (275)..(275): Absent or Gly
  misc_feature (276)..(276): Absent or Val
  misc_feature (277)..(277): Absent or Leu
  misc_feature (278)..(278): Absent or Glu
  misc_feature (279)..(279): Absent or Lys
  misc_feature (280)..(280): Absent or Leu
  misc_feature (281)..(281): Absent or Ile
  misc_feature (282)..(282): Absent or Ala
  misc_feature (283)..(283): Absent or Ala
  misc_feature (284)..(284): Absent or Arg
  misc_feature (285)..(285): Absent or His
  misc_feature (286)..(286): Absent or Glu
  misc_feature (287)..(287): Absent or Leu
  misc_feature (288)..(288): Absent or Ser
  misc_feature (289)..(289): Absent or Gln
  misc_feature (290)..(290): Absent or Met
  misc_feature (291)..(291): Absent or Met
  misc_feature (292)..(292): Absent or Gly
  misc_feature (293)..(293): Absent or Cys
  misc_feature (294)..(294): Absent or Asn
  misc_feature (295)..(295): Absent or Ser
  misc_feature (296)..(296): Absent or Tyr
  misc_feature (297)..(297): Absent or Ala
  misc_feature (298)..(298): Absent or Asp
  misc_feature (299)..(299): Absent or Ile
  misc_feature (300)..(300): Absent or Met
  misc_feature (301)..(301): Absent or Val
  misc_feature (302)..(302): Absent or Glu
  misc_feature (303)..(303): Absent or Pro
  misc_feature (304)..(304): Absent or Asn
  misc_feature (305)..(305): Absent or Leu
  misc_feature (306)..(306): Absent or Ala
  misc_feature (307)..(307): Absent or Lys
  misc_feature (308)..(308): Absent or Ser
  misc_feature (309)..(309): Absent or Pro
  misc_feature (310)..(310): Absent or Lys
  misc_feature (311)..(311): Absent or Val
  misc_feature (312)..(312): Absent or Val
  misc_feature (313)..(313): Absent or Thr
  misc_feature (314)..(314): Absent or Ser
  misc_feature (315)..(315): Absent or Phe
  misc_feature (316)..(316): Absent or Leu
  misc_feature (317)..(317): Absent or Gln
  misc_feature (318)..(318): Absent or Glu
  misc_feature (319)..(319): Absent or Leu
  misc_feature (320)..(320): Absent or Ser
  misc_feature (321)..(321): Absent or Lys
  misc_feature (322)..(322): Absent or Thr
  misc_feature (323)..(323): Absent or Val
  misc_feature (324)..(324): Absent or Lys
  misc_feature (325)..(325): Absent or Pro
  misc_feature (326)..(326): Absent or Lys
  misc_feature (327)..(327): Absent or Ala
  misc_feature (328)..(328): Absent or Asp
  misc_feature (329)..(329): Absent or Glu
  misc_feature (330)..(330): Absent or Glu
  misc_feature (331)..(331): Absent or Phe
  misc_feature (332)..(332): Absent or Ile
  misc_feature (333)..(333): Absent or Ala
  misc_feature (334)..(334): Absent or Ile
  misc_feature (335)..(335): Absent or Arg
  misc_feature (336)..(336): Absent or Asp
  misc_feature (337)..(337): Absent or Phe
  misc_feature (338)..(338): Absent or Lys
  misc_feature (339)..(339): Absent or Arg
  misc_feature (340)..(340): Absent or Glu
  misc_feature (341)..(341): Absent or Lys
  misc_feature (342)..(342): Absent or Cys
  misc_feature (343)..(343): Absent or Gly
  misc_feature (344)..(344): Absent or Asn
  misc_feature (345)..(345): Absent or Pro
  misc_feature (346)..(346): Absent or Ser
  misc_feature (347)..(347): Absent or Ala
  misc_feature (348)..(348): Absent or Glu
  misc_feature (349)..(349): Absent or Leu
  misc_feature (350)..(350): Absent or Glu
  misc_feature (351)..(351): Absent or Pro
  misc_feature (352)..(352): Absent or Trp
  misc_feature (353)..(353): Absent or Asp
  misc_feature (354)..(354): Absent or Glu
  misc_feature (355)..(355): Absent or Thr
  misc_feature (356)..(356): Absent or Tyr
  misc_feature (357)..(357): Absent or Tyr
  misc_feature (358)..(358): Absent or Thr
  misc_feature (359)..(359): Absent or Ser
  misc_feature (360)..(360): Absent or Met
  misc_feature (361)..(361): Absent or Met
  misc_feature (362)..(362): Absent or Lys
  misc_feature (363)..(363): Absent or Ser
  misc_feature (364)..(364): Absent or Ser
  misc_feature (365)..(365): Absent or Ile
  misc_feature (366)..(366): Absent or Asn
  misc_feature (367)..(367): Absent or Asp
  misc_feature (368)..(368): Absent or Val
  misc_feature (369)..(369): Absent or Asp
  misc_feature (370)..(370): Absent or Thr
  misc_feature (371)..(371): Absent or Ala
  misc_feature (372)..(372): Absent or Val
  misc_feature (373)..(373): Absent or Val
  misc_feature (374)..(374): Absent or Ala
  misc_feature (375)..(375): Absent or Ser
  misc_feature (376)..(376): Absent or Tyr
  misc_feature (377)..(377): Absent or Phe
  misc_feature (378)..(378): Absent or Pro
  misc_feature (379)..(379): Absent or Leu
  misc_feature (380)..(380): Absent or Pro
  misc_feature (381)..(381): Absent or Gln
  misc_feature (382)..(382): Absent or Cys
  misc_feature (383)..(383): Absent or Ile
  misc_feature (384)..(384): Absent or Glu
  misc_feature (385)..(385): Absent or Gly
  misc_feature (386)..(386): Absent or Leu
  misc_feature (387)..(387): Absent or Lys
  misc_feature (388)..(388): Absent or Val
  misc_feature (389)..(389): Absent or Leu
  misc_feature (390)..(390): Absent or Val
  misc_feature (391)..(391): Absent or Glu
  misc_feature (392)..(392): Absent or Ser
  misc_feature (393)..(393): Absent or Leu
  misc_feature (394)..(394): Absent or Phe
  misc_feature (395)..(395): Absent or Gly
  misc_feature (396)..(396): Absent or Ala
  misc_feature (397)..(397): Absent or Thr
  misc_feature (398)..(398): Absent or Phe
  misc_feature (399)..(399): Absent or His
  misc_feature (400)..(400): Absent or Thr
  misc_feature (401)..(401): Absent or Ile
  misc_feature (402)..(402): Absent or Pro
  misc_feature (403)..(403): Absent or Leu
  misc_feature (404)..(404): Absent or Ala
  misc_feature (405)..(405): Absent or Pro
  misc_feature (406)..(406): Absent or Gly
  misc_feature (407)..(407): Absent or Glu
  misc_feature (408)..(408): Absent or Ser
  misc_feature (409)..(409): Absent or Trp
  misc_feature (410)..(410): Absent or His
  misc_feature (411)..(411): Absent or Pro
  misc_feature (412)..(412): Absent or Asn
  misc_feature (413)..(413): Absent or Val
  misc_feature (414)..(414): Absent or Val
  misc_feature (415)..(415): Absent or Lys
  misc_feature (416)..(416): Absent or Leu
  misc_feature (417)..(417): Absent or Ser
  misc_feature (418)..(418): Absent or Leu
  misc_feature (419)..(419): Absent or His
  misc_feature (420)..(420): Absent or His
  misc_feature (421)..(421): Absent or Pro
  misc_feature (422)..(422): Absent or Asp
  misc_feature (423)..(423): Absent or Glu
  misc_feature (424)..(424): Absent or Gly
  misc_feature (425)..(425): Absent or Asp
  misc_feature (426)..(426): Absent or Leu
  misc_feature (427)..(427): Absent or Gly
  misc_feature (428)..(428): Absent or Tyr
  misc_feature (429)..(429): Absent or Leu
  misc_feature (430)..(430): Absent or Tyr
  misc_feature (431)..(431): Absent or Leu
  misc_feature (432)..(432): Absent or Asp
  misc_feature (433)..(433): Absent or Leu
  misc_feature (434)..(434): Absent or Tyr
  misc_feature (435)..(435): Absent or Ser
  misc_feature (436)..(436): Absent or Arg
  misc_feature (437)..(437): Absent or Lys
  misc_feature (438)..(438): Absent or Gly
  misc_feature (439)..(439): Absent or Lys
  misc_feature (440)..(440): Absent or Tyr
  misc_feature (441)..(441): Absent or Pro
  misc_feature (442)..(442): Absent or Gly
  misc_feature (443)..(443): Absent or Cys
  misc_feature (444)..(444): Absent or Ala
  misc_feature (445)..(445): Absent or Ser
  misc_feature (446)..(446): Absent or Phe
  misc_feature (447)..(447): Absent or Ala
  misc_feature (448)..(448): Absent or Ile
  misc_feature (449)..(449): Absent or Arg
  misc_feature (450)..(450): Absent or Gly
  misc_feature (451)..(451): Absent or Gly
  misc_feature (452)..(452): Absent or Arg
  misc_feature (453)..(453): Absent or Lys
  misc_feature (454)..(454): Absent or Ile
  misc_feature (455)..(455): Absent or Ser
  misc_feature (456)..(456): Absent or Glu
  misc_feature (457)..(457): Absent or Thr
  misc_feature (458)..(458): Absent or Glu
  misc_feature (459)..(459): Absent or Tyr
  misc_feature (460)..(460): Absent or Gln
  misc_feature (461)..(461): Absent or Leu
  misc_feature (462)..(462): Absent or Pro
  misc_feature (463)..(463): Absent or Val
  misc_feature (464)..(464): Absent or Ile
  misc_feature (465)..(465): Absent or Ala
  misc_feature (466)..(466): Absent or Leu
  misc_feature (467)..(467): Absent or Val
  misc_feature (468)..(468): Absent or Cys
  misc_feature (469)..(469): Absent or Asn
  misc_feature (470)..(470): Absent or Phe
  misc_feature (471)..(471): Absent or Ser
  misc_feature (472)..(472): Absent or Arg
  misc_feature (473)..(473): Absent or Ala
  misc_feature (474)..(474): Absent or Cys
  misc_feature (475)..(475): Absent or Asp
  misc_feature (476)..(476): Absent or Ser
  misc_feature (477)..(477): Absent or Ser
  misc_feature (478)..(478): Absent or Ile
  misc_feature (479)..(479): Absent or Val
  misc_feature (480)..(480): Absent or Lys
  misc_feature (481)..(481): Absent or Leu
  misc_feature (482)..(482): Absent or Asn
  misc_feature (483)..(483): Absent or His
  misc_feature (484)..(484): Absent or Ser
  misc_feature (485)..(485): Absent or Glu
  misc_feature (486)..(486): Absent or Val
  misc_feature (487)..(487): Absent or Glu
  misc_feature (488)..(488): Absent or Val
  misc_feature (489)..(489): Absent or Leu
  misc_feature (490)..(490): Absent or Phe
  misc_feature (491)..(491): Absent or His
  misc_feature (492)..(492): Absent or Glu
  misc_feature (493)..(493): Absent or Phe
  misc_feature (494)..(494): Absent or Gly
  misc_feature (495)..(495): Absent or His
  misc_feature (496)..(496): Absent or Ala
  misc_feature (497)..(497): Absent or Leu
  misc_feature (498)..(498): Absent or His
  misc_feature (499)..(499): Absent or Ser
  misc_feature (500)..(500): Absent or Leu
  misc_feature (501)..(501): Absent or Leu
  misc_feature (502)..(502): Absent or Ser
  misc_feature (503)..(503): Absent or Arg
  misc_feature (504)..(504): Absent or Thr
  misc_feature (505)..(505): Absent or Asp
  misc_feature (506)..(506): Absent or Tyr
  misc_feature (507)..(507): Absent or Gln
  misc_feature (508)..(508): Absent or His
  misc_feature (509)..(509): Absent or Phe
  misc_feature (510)..(510): Absent or Ser
  misc_feature (511)..(511): Absent or Gly
  misc_feature (512)..(512): Absent or Thr
  misc_feature (513)..(513): Absent or Arg
  misc_feature (514)..(514): Absent or Val
  misc_feature (515)..(515): Absent or Ala
  misc_feature (516)..(516): Absent or Leu
  misc_feature (517)..(517): Absent or Asp
  misc_feature (518)..(518): Absent or Leu
  misc_feature (519)..(519): Absent or Ala
  misc_feature (520)..(520): Absent or Glu
  misc_feature (521)..(521): Absent or Met
  misc_feature (522)..(522): Absent or Pro
  misc_feature (523)..(523): Absent or Ser
  misc_feature (524)..(524): Absent or Asn
  misc_feature (525)..(525): Absent or Leu
  misc_feature (526)..(526): Absent or Phe
  misc_feature (527)..(527): Absent or Glu
  misc_feature (528)..(528): Absent or Tyr
  misc_feature (529)..(529): Absent or Tyr
  misc_feature (530)..(530): Absent or Ala
  misc_feature (531)..(531): Absent or Trp
  misc_feature (532)..(532): Absent or Asp
  misc_feature (533)..(533): Absent or Tyr
  misc_feature (534)..(534): Absent or Arg
  misc_feature (535)..(535): Absent or Leu
  misc_feature (536)..(536): Absent or Leu
  misc_feature (537)..(537): Absent or Lys
  misc_feature (538)..(538): Absent or Arg
  misc_feature (539)..(539): Absent or Phe
  misc_feature (540)..(540): Absent or Ala
  misc_feature (541)..(541): Absent or Arg
  misc_feature (542)..(542): Absent or His
  misc_feature (543)..(543): Absent or Tyr
  misc_feature (544)..(544): Absent or Ser
  misc_feature (545)..(545): Absent or Thr
  misc_feature (546)..(546): Absent or Gly
  misc_feature (547)..(547): Absent or Glu
  misc_feature (548)..(548): Absent or Thr
  misc_feature (549)..(549): Absent or Ile
  misc_feature (550)..(550): Absent or Pro
  misc_feature (551)..(551): Absent or Glu
  misc_feature (552)..(552): Absent or Lys
  misc_feature (553)..(553): Absent or Leu
  misc_feature (554)..(554): Absent or Val
  misc_feature (555)..(555): Absent or Asn
  misc_feature (556)..(556): Absent or Ser
  misc_feature (557)..(557): Absent or Leu
  misc_feature (558)..(558): Absent or Gln
  misc_feature (559)..(559): Absent or Gly
  misc_feature (560)..(560): Absent or Ala
  misc_feature (561)..(561): Absent or Arg
  misc_feature (562)..(562): Absent or Asn
  misc_feature (563)..(563): Absent or Met
  misc_feature (564)..(564): Absent or Phe
  misc_feature (565)..(565): Absent or Ala
  misc_feature (566)..(566): Absent or Ala
  misc_feature (567)..(567): Absent or Thr
  misc_feature (568)..(568): Absent or Glu
  misc_feature (569)..(569): Absent or Met
  misc_feature (570)..(570): Absent or Gln
  misc_feature (571)..(571): Absent or Arg
  misc_feature (572)..(572): Absent or Gln
  misc_feature (573)..(573): Absent or Val
  misc_feature (574)..(574): Absent or Phe
  misc_feature (575)..(575): Absent or Tyr
  misc_feature (576)..(576): Absent or Ala
  misc_feature (577)..(577): Absent or Leu
  misc_feature (578)..(578): Absent or Ile
  misc_feature (579)..(579): Absent or Asp
  misc_feature (580)..(580): Absent or Gln
  misc_feature (581)..(581): Absent or Met
  misc_feature (582)..(582): Absent or Leu
  misc_feature (583)..(583): Absent or Phe
  misc_feature (584)..(584): Absent or Gly
  misc_feature (585)..(585): Absent or Glu
  misc_feature (586)..(586): Absent or Gln
  misc_feature (587)..(587): Absent or Pro
  misc_feature (588)..(588): Absent or Glu
  misc_feature (589)..(589): Absent or Thr
  misc_feature (590)..(590): Absent or Ala
  misc_feature (591)..(591): Absent or Arg
  misc_feature (592)..(592): Absent or Asp
  misc_feature (593)..(593): Absent or Val
  misc_feature (594)..(594): Absent or Ser
  misc_feature (595)..(595): Absent or His
  misc_feature (596)..(596): Absent or Leu
  misc_feature (597)..(597): Absent or Val
  misc_feature (598)..(598): Absent or Ala
  misc_feature (599)..(599): Absent or Glu
  misc_feature (600)..(600): Absent or Leu
  misc_feature (601)..(601): Absent or Lys
  misc_feature (602)..(602): Absent or Arg
  misc_feature (603)..(603): Absent or Gln
  misc_feature (604)..(604): Absent or His
  misc_feature (605)..(605): Absent or Thr
  misc_feature (606)..(606): Absent or Ser
  misc_feature (607)..(607): Absent or Trp
  misc_feature (608)..(608): Absent or Asn
  misc_feature (609)..(609): Absent or His
  misc_feature (610)..(610): Absent or Val
  misc_feature (611)..(611): Absent or Glu
  misc_feature (612)..(612): Absent or Gly or Met
  misc_feature (613)..(613): Absent or Thr or Gly
  misc_feature (614)..(614): Absent or His or Ser
  misc_feature (615)..(615): Absent or Trp or Ser
  misc_feature (616)..(616): Absent or Tyr or Ala
  misc_feature (617)..(617): Absent or Ile or Ser
  misc_feature (618)..(618): Absent or Arg or Ser
  misc_feature (619)..(619): Absent or Phe or Gly
  misc_feature (620)..(620): Absent or Ser or Lys
  misc_feature (621)..(621): Absent or His or Gln
  misc_feature (622)..(622): Absent or Leu or Ser
  misc_feature (623)..(623): Absent or Leu or Asn
  misc_feature (624)..(624): Absent or Asn or Gln
  misc_feature (625)..(625): Absent or Tyr or Gln
  misc_feature (626)..(626): Absent or Gly or Ala
  misc_feature (627)..(627): Absent or Ala or Pro
  misc_feature (628)..(628): Absent or Gly or Pro
  misc_feature (629)..(629): Absent or Tyr or Trp
  misc_feature (630)..(630): Absent or Tyr or Pro
  misc_feature (631)..(631): Absent or Ser or Thr
  misc_feature (632)..(632): Absent or Tyr or Thr
  misc_feature (633)..(633): Absent or Leu or Ser
  misc_feature (634)..(634): Absent or Tyr or Arg
  misc_feature (635)..(635): Absent or Ala
  misc_feature (636)..(636): Absent or Lys or Ser
  misc_feature (637)..(637): Absent or Cys or Ala
  misc_feature (638)..(638): Absent or Phe
  misc_feature (639)..(639): Absent or Ala
  misc_feature (640)..(640): Absent or Ser
  misc_feature (641)..(641): Absent or Thr or Gly
  misc_feature (642)..(642): Absent or Ile or Phe
  misc_feature (643)..(643): Absent or Trp or Ser
  misc_feature (644)..(644): Absent or Gln or Pro
  misc_feature (645)..(645): Absent or Ser
  misc_feature (646)..(646): Absent or Ile or Glu
  misc_feature (647)..(647): Absent or Cys or Ile
  misc_feature (648)..(648): Absent or Glu or Leu
  misc_feature (649)..(649): Absent or Glu or Trp
  misc_feature (650)..(650): Absent or Asp or Met
  misc_feature (651)..(651): Absent or Pro or Leu
  misc_feature (652)..(652): Absent or Leu or Pro
  misc_feature (653)..(653): Absent or Ser or Ala
  misc_feature (654)..(654): Absent or Leu or Thr
  misc_feature (655)..(655): Absent or Asn or Gly
  misc_feature (656)..(656): Absent or Thr or Leu
  misc_feature (657)..(657): Absent or Gly or Leu
  misc_feature (658)..(658): Absent or Thr
  misc_feature (659)..(659): Absent or Leu or Ala
  misc_feature (660)..(660): Absent or Leu or Ser
  misc_feature (661)..(661): Absent or Arg or Glu
  misc_feature (662)..(662): Absent or Glu or Ile
  misc_feature (663)..(663): Absent or Lys or Ser
  misc_feature (664)..(664): Absent or Phe or Arg
  misc_feature (665)..(665): Absent or Phe or Ala
  misc_feature (666)..(666): Absent or Lys or Val
  misc_feature (667)..(667): Absent or His or Ala
  misc_feature (668)..(668): Absent or Gly or Ser or Ala
  misc_feature (669)..(669): Absent or Gly or Lys or Ala
  misc_feature (670)..(670): Absent or Ala or Lys or Glu
  misc_feature (671)..(671): Absent or Lys or Ala or Thr
  misc_feature (672)..(672): Absent or Asp or Thr or Ala
  misc_feature (673)..(673): Absent or Pro or Asp or Lys
  misc_feature (674)..(674): Absent or Met or Ala or Asn
  misc_feature (675)..(675): Absent or Ala or Glu or Gln or Ile
  misc_feature (676)..(676): Absent or Leu or Met or His or Ala
  misc_feature (677)..(677): Absent or Gln or Ala or Leu or Cys or Thr
  misc_feature (678)..(678): Absent or Ile or Pro or Leu or Thr or Ser or Ala
  misc_feature (679)..(679): Met or His or Ser or Absent or Gln or Asp or Thr or Ala
  misc_feature (680)..(680): Leu or Ser or Met or Ile or Absent or Ala or Gln
  misc_feature (681)..(681): Leu or Thr or Ser or Ala or His or Absent or Cys or Pro or Gln
  misc_feature (682)..(682): Gln or Ser or Val or Thr or Absent or Gly or Arg or Asp
  misc_feature (683)..(683): Thr or Phe or Leu or Ser or Pro or Absent or Lys or Ile or Ala
  misc_feature (684)..(684): Gln or Leu or Phe or Ile or Cys or Absent or Glu or Val or Met or His
  misc_feature (685)..(685): Phe or Ala or Lys or Gln or Ser or Absent or Ile or Leu or Gly
  misc_feature (686)..(686): Leu or Asn or Lys or Phe or Absent or Ile or His or Thr or Val or Met or Ala
  misc_feature (687)..(687): Ser or Asn or Pro or Absent or Leu or Ala
  misc_feature (688)..(688): Cys or Lys or Ser or His or Ala or Thr or Absent or Val or Met
  misc_feature (689)..(689): Trp or Ser or His or Ala or Arg or Absent or Ile or Pro or Leu
  misc_feature (690)..(690): Val or Phe or Leu or Pro or Absent or Gly or Ser or Thr
  misc_feature (691)..(691): Gln or Leu or Cys or Tyr or Absent or Glu or Asp or Pro or Ala or Thr
  misc_feature (692)..(692): His or Tyr or Leu or Gly or Ala or Absent
  misc_feature (693)..(693): Leu or His or Thr or Ile or Absent or Ser or Phe
  misc_feature (694)..(694): Ser or His or Pro or Phe or Val or Asn or Absent or Ala or Leu
  misc_feature (695)..(695): Pro or Leu or Ile or His or Phe or Absent or Ser or Ala
  misc_feature (696)..(696): Gly or Leu or Thr or Ala or Pro or Phe or Absent or Tyr
  misc_feature (697)..(697): Gln or Tyr or Thr or Ile or Val or Ser or Absent or Pro
  misc_feature (698)..(698): Thr or Ser or Lys or Arg or Asn or Absent or Ala or Gly
  misc_feature (699)..(699): Gln or Lys or Pro or Ser or Absent or Thr or Gly or Ala
  misc_feature (700)..(700): Gly or Pro or Thr or Ile or Absent or Arg or Asn or Ser or Leu
  misc_feature (701)..(701): Arg or Lys or Asn or Ala or Val or Absent or Phe or Gly
  misc_feature (702)..(702): Leu or Ser or Absent or Pro or Ala or Cys
  misc_feature (703)..(703): Phe or Lys or Absent or Arg or Val or Ser or Gly
  misc_feature (704)..(704): Leu or Phe or Ala or Ile or Absent or Pro or Val
  misc_feature (705)..(705): Arg or Thr or Lys or Ala or Absent or Pro
  misc_feature (706)..(706): Ile or Val or Leu or Phe or Absent or Pro
  misc_feature (707)..(707): Asn or Gln or Ile or Lys or Ser or Absent or Leu
  misc_feature (708)..(708): Ile or Ser or Ala or Cys or Met or Absent or Arg
  misc_feature (709)..(709): Lys or Gln or Thr or Val or Absent or Pro or Ala or Leu
  misc_feature (710)..(710): Ser or Lys or Thr or Asp or Asn or Absent or Arg or Pro or Phe
  misc_feature (711)..(711): Absent or Ser or Thr or Pro or Arg
  misc_feature (712)..(712): Absent or Gln or Ile or Pro or Leu or Val or Ala
  misc_feature (713)..(713): Absent or Ile or Phe or Tyr
  misc_feature (714)..(714): Absent or Pro or Ser or Glu or Val or Arg
  misc_feature (715)..(715): Absent or Thr or Ser or Gln or Ala or Ile or Val
  misc_feature (716)..(716): Absent or Pro or Asn or Glu or Asp or Phe or Leu or Ala or Thr
  misc_feature (717)..(717): Absent or Asn or Thr or Arg or Leu or Ala
  misc_feature (718)..(718): Glu or Absent or Pro or Thr or Gln or Ser or Ala
  misc_feature (719)..(719): Lys or Asp or Thr or Gln or Glu or Val or Absent or Ser
  misc_feature (720)..(720): Ala or Asn or Pro or Lys or Asp or Ser or Thr or Absent or Gly
  misc_feature (721)..(721): Ser or Pro or Asn or Absent or Gly
  misc_feature (722)..(722): Ser or Thr or Glu or Arg or Absent or Gly
  misc_feature (723)..(723): Asp or Ala or Lys or Thr or Gln or Arg or Gly or Pro or Absent
  misc_feature (724)..(724): Asp or Pro or Lys or Ser or Arg or Thr or Absent or Gly
  misc_feature (725)..(725): Ser or Lys or Pro or Ala or Arg or Val or Gln or Absent
  misc_feature (726)..(726): Gly or Lys or Ser or Gln or Asn or Leu or Arg or Absent
  misc_feature (727)..(727): Pro or Thr or Ser or Arg or Leu or Absent or Lys
  misc_feature (728)..(728): Ser or Thr or Val or Leu or Absent or Pro or Gly or Ala
  misc_feature (729)..(729): Lys or Pro or Ser or Val or Arg or Absent or Gly
  misc_feature (730)..(730): Thr or Pro or Ser or Arg or Absent or Lys
  misc_feature (731)..(731): Gly or Val or Pro or Absent or Ser
  misc_feature (732)..(732): Val or Leu or Gln or Arg or Asn or Absent or Lys
  misc_feature (733)..(733): Gly or Ser or Absent or Asp
  misc_feature (734)..(734): Phe or Leu or Asn or Absent or Gln or Ser or Ala
  misc_feature (736)..(736): Ser or Asp or Phe or Absent or Gln or Asn
  misc_feature (737)..(737): Ser or Gln or Absent or Pro or Glu or Cys or Lys
  misc_feature (738)..(738): Absent or Ser or Ala or Arg or Gly
  misc_feature (739)..(739): Absent or Gly or Lys
  misc_feature (740)..(740): Absent or Gly or Trp
  misc_feature (741)..(741): Absent or Ser or Arg
  misc_feature (742)..(742): Absent or Glu or Ile
  misc_feature (743)..(743): Absent or Lys or Met
  misc_feature (744)..(744): Absent or Ala
  misc_feature (745)..(745): Absent or Gly or Asp
  misc_feature (746)..(746): Absent or Val or Asn
  misc_feature (747)..(747): Absent or Asp or Gln or Lys or Glu
  misc_feature (748)..(748): Absent or Ser or Ala or Gly or Asp
  misc_feature (749)..(749): Absent or Thr or Val or Gln or Ser
  misc_feature (750)..(750): Absent or Gly or Ala
  misc_feature (751)..(751): Absent or Asp or Gln or Gly
  misc_feature (752)..(752): Absent or Asn or Glu or Gly
  misc_feature (753)..(753): Absent or Gly or Ser or Ala
  misc_feature (754)..(754): Absent or Lys or Thr or Gly
  misc_feature (755)..(755): Absent or Ser or Ala or X or Lys
  misc_feature (756)..(756): Absent or Ser or Gly
  misc_feature (757)..(757): Absent or Val or Lys
  misc_feature (758)..(758): Absent or Asp or Glu or Gly
  misc_feature (759)..(759): Absent or Ala or Glu or Lys
  misc_feature (760)..(760): Absent or Pro or Ala or Lys
  misc_feature (761)..(761): Absent or Ser or Ala or Pro or Val or Thr or Leu
  misc_feature (762)..(762): Asp or Ser or Ala or Gln or Absent or Pro or Glu
  misc_feature (763)..(763): Thr or Ser or Ala or Glu or Absent or Pro
  misc_feature (764)..(764): Ala or Ser or Thr or Lys or Absent or Pro
  misc_feature (765)..(765): Ala or Ser or Thr or Pro or Absent or Asp
  misc_feature (766)..(766): Val or Ser or Ala or Glu or Absent or Pro
  misc_feature (767)..(767): Pro or Lys or Ser or Leu or Absent or Ala or Thr or Val
  misc_feature (768)..(768): Val or Ala or Thr or Absent or Lys or Ser or Pro or Ile
  misc_feature (769)..(769): Ser or Ala or Absent or Leu or Lys or Arg or Pro
  misc_feature (770)..(770): Ser or Gly or Val or Absent or Gln or Leu or Trp or Arg
  misc_feature (771)..(771): Lys or Thr or Gly or Asn or Absent or Ala or Val or Ser
  misc_feature (772)..(772): Lys or Asp or Ser or Absent or Ala or Pro
  misc_feature (773)..(773): Absent or Val or Glu or Thr or Gly or Ser or Ala or Pro
  misc_feature (774)..(774): Absent or Ser or Gly or Arg
  misc_feature (775)..(775): Absent or Asn or Gly or Ser
  misc_feature (776)..(776): Lys or Absent or Asn or Thr or Phe or Ala
  misc_feature (777)..(777): Lys or Asn or Absent or Gly or Ser
  misc_feature (778)..(778): Lys or Gly or Pro or Absent or Val or Ile
  misc_feature (779)..(779): Ala or His or Pro or Glu or Gly or Phe or Leu or Absent
  misc_feature (780)..(780): Gln or Lys or Gly or Pro or Absent or Asp or Glu
  misc_feature (781)..(781): Arg or Gly or Pro or Ser or Absent or Gln
  misc_feature (782)..(782): Absent or Asn or Ser or Gln or Pro
  misc_feature (783)..(783): Absent or Lys or Arg or Ala or Gln or Glu
  misc_feature (784)..(784): Absent or Arg or Asn
  misc_feature (785)..(785): Glu or Absent or Pro or Lys or Arg or Thr
  misc_feature (786)..(786): Arg or Lys or Gly or Glu or Absent or Ala
  misc_feature (787)..(787): Ala or Lys or Arg or Ser or Glu or Absent or Phe
  misc_feature (788)..(788): Ser or Glu or Thr or Tyr or Gly or Absent
  misc_feature (789)..(789): Ile or Val or Lys or Gly or Phe or Gln or Arg or Pro
  misc_feature (790)..(790): Ile or Asn or Pro or Arg or Ala or Ser or Gly
  misc_feature (791)..(791): Arg or Ser or Lys or Absent or Asn or Pro or Gly
  misc_feature (792)..(792): Arg or Ser or Gly
  misc_feature (793)..(793): Ser or Ala or Lys or Glu or Arg or Gly or Pro
  misc_feature (794)..(794): Pro or Glu or Asn or Arg or Asp or Gly
  misc_feature (795)..(795): Leu or Val or Ala or Lys or Asp or Gly
  misc_feature (796)..(796): Glu or Gln or Lys or Arg or Pro or Ile or Asn
  misc_feature (797)..(797): Lys or Arg or Gly or Val
  misc_feature (799)..(799): Ala or Gly or Glu or Val or Ser or Asp or Arg or Thr or Pro
  misc_feature (800)..(800): Phe or Thr or Pro or Absent
  misc_feature (801)..(801): Val or Ile or Leu or Met or Absent
  misc_feature (802)..(802): Ser or Gly or Arg or Val or Absent
  misc_feature (803)..(803): Glu or Gln or Val or Arg or Absent
  misc_feature (804)..(804): Gln or Glu or Asn or Arg or Absent
  misc_feature (805)..(805): Absent or Ile or Ala
  misc_feature (806)..(806): Absent or Pro
  misc_feature (807)..(807): Absent or Glu or Pro
  misc_feature (808)..(808): Absent or Lys or Gly
  misc_feature (809)..(809): Absent or Pro or Arg
  misc_feature (810)..(810): Absent or Leu or Pro
  misc_feature (811)..(811): Absent or Ile or Leu
  misc_feature (812)..(812): Absent or Gln or Ile
  misc_feature (813)..(813): Gln or Asp or Asn or Glu or Gly or Ser or Ala or Absent
  misc_feature (814)..(814): Val or Glu or Gln or Ala or Pro or Arg or Lys
  misc_feature (815)..(815): Gly or Ala or Val or Pro or Glu or Ser or Asn or Asp
  misc_feature (816)..(816): Lys or Glu or Ala or Gly
  misc_feature (817)..(817): Ala or Val or Ser or Asp or Phe or Leu or Arg
  misc_feature (818)..(818): Lys or Glu or Asn or Pro or Arg
  misc_feature (819)..(819): Glu or Gln or Absent
  misc_feature (820)..(820): Glu or Gln or Leu or Met or Val or Absent or Arg or Gly
  misc_feature (821)..(821): Asn or Gly or Arg or Ser or Gln or Absent
  misc_feature (822)..(822): Lys or Arg or Gln or Gly or Ala
  misc_feature (825)..(825): Ser or Thr or Asn or Arg or Lys
  misc_feature (828)..(828): Absent or Leu or X
  misc_feature (831)..(831): Ala or Thr or Ser or Leu or Pro
  misc_feature (837)..(837): Val or Gly or Ile or Ala or Thr or Leu
  misc_feature (838)..(838): Val or Ile or Leu or Absent
  misc_feature (841)..(841): Val or Ile or Ala or Phe
  misc_feature (844)..(844): Ile or Leu or Phe
  misc_feature (845)..(845): Ala or Ile or Leu or Val
  misc_feature (856)..(856): Trp or Absent or Leu or Tyr
  misc_feature (858)..(858): Gln or Lys or Absent or X or Ser or Arg
  misc_feature (863)..(863): Phe or Tyr or Absent or Thr or Ala
  misc_feature (867)..(867): Ser or Absent or Val or Asp or Trp
  misc_feature (873)..(873): Phe or Gly or Absent or Val or Leu or Ile or Ser
  misc_feature (876)..(876): Val or Absent or Leu or Met
  misc_feature (877)..(877): Ala or Absent or Leu or Gly or Arg
  misc_feature (878)..(878): Absent or X or Leu or Gly or Arg
  misc_feature (879)..(879): Gly or Ala or Thr or Pro or Val
  misc_feature (880)..(880): Ala or Thr or Val or Glu
  misc_feature (881)..(881): Val or Leu or Thr or Gly or Ala
  misc_feature (882)..(882): Ala or Thr or Ser or Absent or Met
  misc_feature (886)..(886): Phe or Leu or Ser or Absent or Tyr or Pro or Met
  misc_feature (889)..(889): Leu or Absent or Ile or Phe or Val
  misc_feature (890)..(890): Gln or Absent or Gly or Glu or Ile
  misc_feature (891)..(891): Asn or Absent or Tyr or Asp or Gly or Ser or Leu or Phe
  misc_feature (893)..(893): Lys or Glu or Asn or Absent or Pro or Leu or Met
  misc_feature (894)..(894): Absent or Lys
  misc_feature (895)..(895): Absent or Gln
  misc_feature (896)..(896): Absent or Arg
  misc_feature (897)..(897): Absent or Leu
  misc_feature (898)..(898): Absent or Asp
  misc_feature (899)..(899): Absent or Ser
  misc_feature (900)..(900): Absent or Phe
  misc_feature (901)..(901): Absent or Gln
  misc_feature (902)..(902): Ile or Leu or Absent or Met or Ser or Gln or Val
  misc_feature (903)..(903): Thr or Lys or Absent or Gln or Leu or Asn or Ile
  misc_feature (904)..(904): Glu or Asp or Thr or Absent or Gly or Arg or Ala or Ser or Val
  misc_feature (905)..(905): Gln or Leu or Pro or Absent or Ser or Met
  misc_feature (906)..(906): Lys or Absent or Glu or Arg or Tyr
  misc_feature (907)..(907): Absent or Ser or Glu
  misc_feature (908)..(908): Absent or Arg or Val
  misc_feature (909)..(909): Absent or Val or Ala
  misc_feature (910)..(910): Absent or Cys
  unsure (1)..(910): unsure at all Xaa locations
XXXXXXXXXXXXXXXXXXXXXXXXXXXXXXXXXXXXXXXXXXXXXXXXXXXXXXXXXXXXXXXXXXXXXXXXXXXXXXXXXXXXXXXXXXXXXXXXXXXXXXXXXXXXXXXXXXXXXXXXXXXXXXXXXXXXXXXXXXXXXXXXXXXXXXXXXXXXXXXXXXXXXXXXXXXXXXXXXXXXXXXXXXXXXXXXXXXXXXXXXXXXXXXXXXXXXXXXXXXXXXXXXXXXXXXXXXXXXXXXXXXXXXXXXXXXXXXXXXXXXXXXXXXXXXXXXXXXXXXXXXXXXXXXXXXXXXXXXXXXXXXXXXXXXXXXXXXXXXXXXXXXXXXXXXXXXXXXXXXXXXXXXXXXXXXXXXXXXXXXXXXXXXXXXXXXXXXXXXXXXXXXXXXXXXXXXXXXXXXXXXXXXXXXXXXXXXXXXXXXXXXXXXXXXXXXXXXXXXXXXXXXXXXXXXXXXXXXXXXXXXXXXXXXXXXXXXXXXXXXXXXXXXXXXXXXXXXXXXXXXXXXXXXXXXXXXXXXXXXXXXXXXXXXXXXXXXXXXXXXXXXXXXXXXXXXXXXXXXXXXXXXXXXXXXXXXXXXXXXXXXXXXXXXXXXXXXXXXXXXXXXXXXXXXXXXXXXXXXXXXXXXXXXXXXXXXXXXXXXXXXXXXXXXXXXXXXXXXXXXXXXXXXXXXXXXXXXXXXXXXXXXXXXXXXXXXXXXXXXXXXXXXXXXXXXXXXXXXXXXXXXXXXXXXXXXXXGXXXXXXXXXXXXXXXXXXXXXXXXXXXXXXXXXXXXXXXXXXXXXXXXXXXXXXXXXXXXXXPXXXXXXXXXXXXXXXXXXXXXXXXNEXAFXLLXWLGLGXXILXEGXXLAASGFLPEEXDXFFVKXLYPXFTPTVXLFXXXXXXXYGVXKYXXXEXXXXXXXXXXXXXXXXXX

SEQ ID NO: 36472 - protein, 614 aa, Artificial sequence
  consensus sequence of seq id no: 544  and its homologs
  misc_feature (1)..(1): Absent or Met
  misc_feature (2)..(2): Absent or Lys
  misc_feature (3)..(3): Absent or Lys
  misc_feature (4)..(4): Absent or Lys
  misc_feature (5)..(5): Absent or Lys
  misc_feature (6)..(6): Absent or Lys
  misc_feature (7)..(7): Absent or Glu
  misc_feature (8)..(8): Absent or Ser
  misc_feature (9)..(9): Absent or Asp
  misc_feature (10)..(10): Absent or Thr
  misc_feature (11)..(11): Absent or Asn
  misc_feature (12)..(12): Absent or Arg
  misc_feature (13)..(13): Absent or Thr
  misc_feature (14)..(14): Absent or Leu
  misc_feature (15)..(15): Absent or Arg
  misc_feature (16)..(16): Absent or Ser
  misc_feature (17)..(17): Absent or Ser
  misc_feature (18)..(18): Absent or Pro
  misc_feature (19)..(19): Absent or Gly
  misc_feature (20)..(20): Absent or Arg
  misc_feature (21)..(21): Absent or Asp
  misc_feature (22)..(22): Absent or Gln
  misc_feature (23)..(23): Absent or Met
  misc_feature (24)..(24): Absent or Asp
  misc_feature (25)..(25): Absent or Asn
  misc_feature (26)..(26): Absent or Ile
  misc_feature (27)..(27): Absent or Val
  misc_feature (28)..(28): Absent or Asp
  misc_feature (29)..(29): Absent or Ser
  misc_feature (30)..(30): Absent or Leu
  misc_feature (31)..(31): Absent or Asn
  misc_feature (32)..(32): Absent or Lys
  misc_feature (33)..(33): Absent or Ala
  misc_feature (34)..(34): Absent or Tyr
  misc_feature (35)..(35): Absent or Glu
  misc_feature (36)..(36): Absent or Lys
  misc_feature (37)..(37): Absent or Phe
  misc_feature (38)..(38): Absent or Val
  misc_feature (39)..(39): Absent or Leu
  misc_feature (40)..(40): Absent or Ala
  misc_feature (41)..(41): Absent or Ser
  misc_feature (42)..(42): Absent or Ala
  misc_feature (43)..(43): Absent or Gly
  misc_feature (44)..(44): Absent or Val
  misc_feature (45)..(45): Absent or Leu
  misc_feature (46)..(46): Absent or Glu
  misc_feature (47)..(47): Absent or Ser
  misc_feature (48)..(48): Absent or Lys
  misc_feature (49)..(49): Absent or Glu
  misc_feature (50)..(50): Absent or Ser
  misc_feature (51)..(51): Absent or Ala
  misc_feature (52)..(52): Absent or Gly
  misc_feature (53)..(53): Absent or Gly
  misc_feature (54)..(54): Absent or Gln
  misc_feature (55)..(55): Absent or Lys
  misc_feature (56)..(56): Absent or Ala
  misc_feature (57)..(57): Absent or Leu
  misc_feature (58)..(58): Absent or Leu
  misc_feature (59)..(59): Absent or Thr
  misc_feature (60)..(60): Absent or Asp
  misc_feature (61)..(61): Absent or Thr
  misc_feature (62)..(62): Absent or Ala
  misc_feature (63)..(63): Absent or Leu
  misc_feature (64)..(64): Absent or Glu
  misc_feature (65)..(65): Absent or Asn
  misc_feature (66)..(66): Absent or Phe
  misc_feature (67)..(67): Absent or Lys
  misc_feature (68)..(68): Absent or Glu
  misc_feature (69)..(69): Absent or Lys
  misc_feature (70)..(70): Absent or Trp
  misc_feature (71)..(71): Absent or Glu
  misc_feature (72)..(72): Absent or Leu
  misc_feature (73)..(73): Absent or Phe
  misc_feature (74)..(74): Absent or Arg
  misc_feature (75)..(75): Absent or Val
  misc_feature (76)..(76): Absent or Ala
  misc_feature (77)..(77): Absent or Cys
  misc_feature (78)..(78): Absent or Asp
  misc_feature (79)..(79): Absent or Gln
  misc_feature (80)..(80): Absent or Ala
  misc_feature (81)..(81): Absent or Glu
  misc_feature (82)..(82): Absent or Glu
  misc_feature (83)..(83): Absent or Phe
  misc_feature (84)..(84): Absent or Val
  misc_feature (85)..(85): Absent or Glu
  misc_feature (86)..(86): Absent or Ser
  misc_feature (87)..(87): Absent or Val
  misc_feature (88)..(88): Absent or Lys
  misc_feature (89)..(89): Absent or Gln
  misc_feature (90)..(90): Absent or Arg
  misc_feature (91)..(91): Absent or Ile
  misc_feature (92)..(92): Absent or Gly
  misc_feature (93)..(93): Absent or Ser
  misc_feature (94)..(94): Absent or Glu
  misc_feature (95)..(95): Absent or Cys
  misc_feature (96)..(96): Absent or Leu
  misc_feature (97)..(97): Absent or Val
  misc_feature (98)..(98): Absent or Asp
  misc_feature (99)..(99): Absent or Glu
  misc_feature (100)..(100): Absent or Ala
  misc_feature (101)..(101): Absent or Thr
  misc_feature (102)..(102): Absent or Gly
  misc_feature (103)..(103): Absent or Leu
  misc_feature (104)..(104): Absent or Thr
  misc_feature (105)..(105): Absent or Thr
  misc_feature (106)..(106): Absent or Thr
  misc_feature (107)..(107): Absent or Ala
  misc_feature (108)..(108): Absent or Ala
  misc_feature (109)..(109): Absent or Gly
  misc_feature (110)..(110): Absent or Gly
  misc_feature (111)..(111): Absent or Gln
  misc_feature (112)..(112): Absent or Ala
  misc_feature (113)..(113): Absent or Pro
  misc_feature (114)..(114): Absent or Ala
  misc_feature (115)..(115): Absent or Ala
  misc_feature (116)..(116): Absent or Val
  misc_feature (117)..(117): Absent or Thr
  misc_feature (118)..(118): Absent or Gly
  misc_feature (119)..(119): Absent or Ala
  misc_feature (120)..(120): Absent or Ala
  misc_feature (121)..(121): Absent or Thr
  misc_feature (122)..(122): Absent or Ser
  misc_feature (123)..(123): Absent or Leu
  misc_feature (124)..(124): Absent or Pro
  misc_feature (125)..(125): Absent or Pro
  misc_feature (126)..(126): Absent or Ile
  misc_feature (127)..(127): Absent or Ser
  misc_feature (128)..(128): Absent or Ala
  misc_feature (129)..(129): Absent or Val
  misc_feature (130)..(130): Absent or Arg
  misc_feature (131)..(131): Absent or Leu
  misc_feature (132)..(132): Absent or Glu
  misc_feature (133)..(133): Absent or Gln
  misc_feature (134)..(134): Absent or Met
  misc_feature (135)..(135): Absent or Ser
  misc_feature (136)..(136): Absent or Arg
  misc_feature (137)..(137): Absent or Ala
  misc_feature (138)..(138): Absent or Val
  misc_feature (139)..(139): Absent or Arg
  misc_feature (140)..(140): Absent or Trp
  misc_feature (141)..(141): Absent or Leu
  misc_feature (142)..(142): Absent or Val
  misc_feature (143)..(143): Absent or Leu
  misc_feature (144)..(144): Absent or Glu
  misc_feature (145)..(145): Absent or Leu
  misc_feature (146)..(146): Absent or Gln
  misc_feature (147)..(147): Absent or Arg
  misc_feature (148)..(148): Absent or Gly
  misc_feature (149)..(149): Absent or Ser
  misc_feature (150)..(150): Absent or Gly
  misc_feature (151)..(151): Absent or Val
  misc_feature (152)..(152): Absent or Ala or Met
  misc_feature (153)..(153): Absent or Pro or Leu
  misc_feature (154)..(154): Absent or Gly or Asp or Pro
  misc_feature (155)..(155): Absent or Ser or Cys
  misc_feature (156)..(156): Absent or Val or Ser or Leu
  misc_feature (157)..(157): Absent or His or Phe or Arg
  misc_feature (158)..(158): Absent or Ser or Leu
  misc_feature (159)..(159): Absent or Met or Ser or Asp or His
  misc_feature (160)..(160): Absent or Asp or Ser or Ala
  misc_feature (161)..(161): Absent or Asn or Thr or Asp or Arg
  misc_feature (162)..(162): Absent or Ile or Gly or Glu or Phe
  misc_feature (163)..(163): Absent or Val or Lys or Cys
  misc_feature (164)..(164): Absent or Asp or Glu or Cys
  misc_feature (165)..(165): Absent or Ala or Phe or Cys
  misc_feature (166)..(166): Absent or Leu or Trp or Arg
  misc_feature (167)..(167): Absent or Asn or Val or Asp
  misc_feature (168)..(168): Absent or Asn or Leu or Ala
  misc_feature (169)..(169): Absent or Ala or Gly
  misc_feature (170)..(170): Absent or Tyr or Lys or Gly
  misc_feature (171)..(171): Absent or Gln or Phe or Leu or Met
  misc_feature (172)..(172): Absent or Glu or Asp or Gly
  misc_feature (173)..(173): Absent or Phe or Trp or Gly
  misc_feature (174)..(174): Absent or Val or Leu or Ser or Tyr
  misc_feature (175)..(175): Absent or Ser or Val or Ala or Ile
  misc_feature (176)..(176): Absent or Ala or Trp or Arg
  misc_feature (177)..(177): Absent or Ala or Lys or His
  misc_feature (178)..(178): Absent or Ala or His or Ser
  misc_feature (179)..(179): Absent or Ser or Leu or Arg
  misc_feature (180)..(180): Absent or Val or Pro or Ser
  misc_feature (181)..(181): Absent or Leu or Asn or Met or His
  misc_feature (182)..(182): Absent or Glu or Thr or Asp or Ala or Gly or Pro
  misc_feature (183)..(183): Absent or Ala or Arg or Ser or Cys or Thr
  misc_feature (184)..(184): Absent or Lys or Ser or Thr or Pro
  misc_feature (185)..(185): Absent or Glu or Lys or Ser or Cys or Ala or Gly
  misc_feature (186)..(186): Absent or Ser or His or Met or Arg
  misc_feature (187)..(187): Absent or Ser or Leu or Asp or Glu or Ala
  misc_feature (188)..(188): Absent or Gly or Arg or Met or Ala
  misc_feature (189)..(189): Absent or Ala or Cys or Ser or Phe
  misc_feature (190)..(190): Absent or Gln or Leu or Val
  misc_feature (191)..(191): Absent or Lys or Arg or Gln or Ala or Val
  misc_feature (192)..(192): Absent or Thr or Arg or Ala or Ser or Asn
  misc_feature (193)..(193): Absent or Ala or Gln or Lys or Glu
  misc_feature (194)..(194): Absent or Ala or Ser or Asn or Thr or Ile
  misc_feature (195)..(195): Absent or Thr or Leu or Ser or Pro
  misc_feature (196)..(196): Absent or Asp or Phe or Ala or Val or Leu
  misc_feature (197)..(197): Absent or Ala or Met or Val or Tyr or Phe
  misc_feature (198)..(198): Absent or Ala or Gly or Tyr or Ser or Met
  misc_feature (199)..(199): Absent or Met or Leu or Glu or Asn or Val
  misc_feature (200)..(200): Absent or Asp or Glu or Asn or Lys or Gln or Gly or Ala
  misc_feature (201)..(201): Absent or Phe or Asn or Met or Ser or Leu or Pro
  misc_feature (202)..(202): Absent or Lys or Gly or Phe or Ile or Leu or Arg or Asn or Pro or Thr or Met
  misc_feature (203)..(203): Absent or Asp or Lys or Gln or Pro or Arg
  misc_feature (204)..(204): Absent or Glu or Gln or Tyr or Val or Leu or Ser or Gly or His or Pro
  misc_feature (205)..(205): Absent or Val or Arg or Lys or His or Ala or Met or Thr or Leu
  misc_feature (206)..(206): Absent or Gln or Trp or Leu or Ser or His or Arg or Ala or Phe
  misc_feature (207)..(207): Absent or Arg or Lys or Glu or Ile or Leu or Val or Met
  misc_feature (208)..(208): Met or Val or Leu or Absent or Trp or Phe or Arg or Gln or His
  misc_feature (209)..(209): Leu or Lys or Tyr or Phe or Absent or Val or Ser or Thr or Ile or Met
  misc_feature (210)..(210): Leu or Phe or Cys or Arg or Ser or Absent or Ala or Thr
  misc_feature (211)..(211): Arg or Gly or Trp or Val or Absent or Cys or Tyr or Leu
  misc_feature (212)..(212): Ser or Ile or Ala or Asp or Absent or Leu or Gly or Pro
  misc_feature (213)..(213): Val or Asn or Ser or Cys or Absent or Gly or Arg or Pro or Thr
  misc_feature (214)..(214): Gln or His or Asp or Glu or Absent or Thr or Met or Ile or Val
  misc_feature (216)..(216): Gly or Absent or Trp or Leu or Ile or Val
  misc_feature (217)..(217): Asp or Asn or Ser or Ala or Pro or Absent or Lys or Glu
  misc_feature (219)..(219): Gly or Glu or Absent or Leu or Ile or Thr
  misc_feature (221)..(221): Arg or Lys or Val or Gln or Absent or Asn or Leu or Gly or Trp
  misc_feature (225)..(225): His or Lys or Ala or Tyr or Absent or Arg or Cys or Thr or Phe
  misc_feature (226)..(226): Phe or Ser or Gln or X or Absent or Ala or Leu or Ile
  misc_feature (227)..(227): Absent or Arg
  misc_feature (228)..(228): Absent or Ile
  misc_feature (229)..(229): Absent or Gly
  misc_feature (230)..(230): Absent or Ser
  misc_feature (231)..(231): Absent or Glu
  misc_feature (232)..(232): Absent or Cys or Ser
  misc_feature (233)..(233): Val or Leu or Absent or Ile or Thr
  misc_feature (235)..(235): Leu or Phe or Asp or Ile or Absent
  misc_feature (236)..(236): Leu or Ile or Glu or Lys or Absent or Val or Thr or Ala
  misc_feature (237)..(237): Val or Ala or Leu or Absent or Phe or Ile
  misc_feature (239)..(239): Absent or Gly or Asn
  misc_feature (240)..(240): Absent or Ser
  misc_feature (241)..(241): Absent or Val
  misc_feature (242)..(242): Absent or Ala
  misc_feature (243)..(243): Absent or Gly
  misc_feature (244)..(244): Absent or Lys
  misc_feature (245)..(245): Absent or Pro
  misc_feature (246)..(246): Absent or Gly
  misc_feature (247)..(247): Absent or Gln
  misc_feature (248)..(248): Absent or Ala
  misc_feature (249)..(249): Absent or Val
  misc_feature (250)..(250): Absent or Thr
  misc_feature (251)..(251): Absent or Ala
  misc_feature (252)..(252): Absent or Gly
  misc_feature (253)..(253): Absent or Leu
  misc_feature (254)..(254): Absent or Pro
  misc_feature (255)..(255): Absent or Pro
  misc_feature (256)..(256): Absent or Ile
  misc_feature (257)..(257): Absent or Ser
  misc_feature (258)..(258): Absent or Ala
  misc_feature (259)..(259): Absent or Val
  misc_feature (260)..(260): Absent or Arg
  misc_feature (261)..(261): Absent or Leu
  misc_feature (262)..(262): Absent or Glu
  misc_feature (263)..(263): Absent or Gln
  misc_feature (264)..(264): Absent or Met
  misc_feature (265)..(265): Absent or Ser
  misc_feature (266)..(266): Absent or Lys
  misc_feature (267)..(267): Absent or Ala
  misc_feature (268)..(268): Absent or Val
  misc_feature (269)..(269): Absent or Arg
  misc_feature (270)..(270): Absent or Trp
  misc_feature (271)..(271): Absent or Leu
  misc_feature (272)..(272): Absent or Val
  misc_feature (273)..(273): Absent or Ile
  misc_feature (274)..(274): Absent or Glu
  misc_feature (275)..(275): Absent or Leu
  misc_feature (276)..(276): Absent or Gln
  misc_feature (277)..(277): Absent or His
  misc_feature (278)..(278): Absent or Gly
  misc_feature (279)..(279): Absent or Ser
  misc_feature (280)..(280): Absent or Gly
  misc_feature (281)..(281): Absent or Thr
  misc_feature (282)..(282): Absent or Ala
  misc_feature (283)..(283): Absent or Gly
  misc_feature (284)..(284): Absent or Gly
  misc_feature (285)..(285): Absent or Pro
  misc_feature (286)..(286): Absent or Ser
  misc_feature (287)..(287): Absent or His
  misc_feature (288)..(288): Absent or Ser
  misc_feature (289)..(289): Absent or His
  misc_feature (290)..(290): Absent or Val
  misc_feature (291)..(291): Absent or Ser
  misc_feature (292)..(292): Absent or Ala
  misc_feature (293)..(293): Absent or Pro
  misc_feature (294)..(294): Absent or Phe
  misc_feature (295)..(295): Absent or Asp
  misc_feature (296)..(296): Absent or Ala
  misc_feature (297)..(297): Absent or Arg
  misc_feature (298)..(298): Absent or Phe
  misc_feature (299)..(299): Absent or Ser
  misc_feature (300)..(300): Absent or Glu
  misc_feature (301)..(301): Absent or Asp
  misc_feature (302)..(302): Absent or Ala
  misc_feature (303)..(303): Absent or Ile
  misc_feature (304)..(304): Absent or Gly
  misc_feature (305)..(305): Absent or Ser
  misc_feature (306)..(306): Absent or Leu
  misc_feature (307)..(307): Absent or Gly
  misc_feature (308)..(308): Absent or Leu
  misc_feature (309)..(309): Absent or Lys
  misc_feature (310)..(310): Absent or Val
  misc_feature (311)..(311): Absent or Leu
  misc_feature (312)..(312): Absent or Trp
  misc_feature (313)..(313): Absent or His
  misc_feature (314)..(314): Absent or Phe
  misc_feature (315)..(315): Absent or Leu
  misc_feature (316)..(316): Absent or His
  misc_feature (317)..(317): Absent or Phe
  misc_feature (318)..(318): Absent or Ile
  misc_feature (319)..(319): Absent or Val
  misc_feature (320)..(320): Absent or Ser
  misc_feature (321)..(321): Leu or Phe or Val or Ala or Absent or Ile
  misc_feature (322)..(322): Trp or Absent or Ile or Phe or Leu or Cys
  misc_feature (323)..(323): Tyr or Phe or Absent or Ala or Gly or Asn or Asp or Ser
  misc_feature (324)..(324): Leu or Phe or Absent or Ile or Tyr or Ser
  misc_feature (325)..(325): Gly or Ala or Ile or Absent or Val or Leu or Trp or Cys
  misc_feature (326)..(326): Ala or Val or Arg or Ser or Absent or Phe
  misc_feature (327)..(327): Gly or Gln or Val or Absent or Thr or His or Asp
  misc_feature (328)..(328): Ile or Val or Ala or Absent or Leu
  misc_feature (329)..(329): Ala or Gly or Absent or Phe or Ile or Lys or Ser
  misc_feature (330)..(330): Gln or Asn or Tyr or Absent or Glu or Asp or Phe
  misc_feature (331)..(331): Val or Leu or Absent or Ala or Lys or Asp or Ser or Asn
  misc_feature (332)..(332): Thr or Ile or Leu or Phe or Absent or Ser
  misc_feature (334)..(334): Ser or Absent or Cys
  misc_feature (336)..(336): Leu or Phe or Absent or Ala
  misc_feature (339)..(339): Asn or Ser or Absent or Cys or Leu or Lys or Phe
  misc_feature (342)..(342): Leu or Absent or Asn or Ile
  misc_feature (343)..(343): Asn or Lys or Absent or Glu or Pro or Arg or Trp
  misc_feature (346)..(346): Lys or Arg or Glu or Absent or Gly or Gln
  misc_feature (347)..(347): Thr or Ser or Ala or Absent or Asn or Asp or Lys
  misc_feature (348)..(348): Leu or Ile or Absent or Ser or Phe
  misc_feature (349)..(349): Asp or Asn or His or Absent or Gln
  misc_feature (350)..(350): Val or Leu or Ser or Absent or Arg or Phe
  misc_feature (351)..(351): Gly or Absent or Glu or Lys or Met or Asp
  misc_feature (352)..(352): Lys or Asn or Absent or Arg
  misc_feature (354)..(354): Arg or Absent or Gln or Glu or Ala or Lys or Asn
  misc_feature (355)..(355): Tyr or Absent or Cys or Ile or Trp or His
  misc_feature (358)..(358): Ile or Absent or Val or Ser
  misc_feature (360)..(360): Val or Ile or Absent or X
  misc_feature (361)..(361): Glu or Absent or Asp
  misc_feature (363)..(363): Glu or Asp or Absent or Arg or Lys
  misc_feature (366)..(366): Tyr or Cys or His or Absent or Gln or Glu or Lys or Asn
  misc_feature (367)..(367): Gln or Arg or Absent or Asp or Thr or Asn or Ser
  misc_feature (368)..(368): Ile or Absent or Val or Glu or Ala or Thr
  misc_feature (369)..(369): Ser or Pro or Absent or Ala or Met or Leu or Glu or Val
  misc_feature (370)..(370): Absent or Ser
  misc_feature (371)..(371): Glu or Lys or Arg or Absent or Asn
  misc_feature (372)..(372): Val or Absent or Ile
  misc_feature (373)..(373): Leu or Ile or Val or Absent or Cys or Lys or Asn
  misc_feature (374)..(374): Gln or Glu or Lys or Absent or Arg
  misc_feature (377)..(377): Gln or Asn or Absent or Met or Arg or Cys or Tyr
  misc_feature (380)..(380): Glu or Gln or Ala or Asp or Absent or Thr or Ser or Lys
  misc_feature (381)..(381): Ala or Thr or Ser or Ile or Absent or Asp or Asn
  misc_feature (382)..(382): Ile or Absent or Val or Met or Leu
  misc_feature (386)..(386): His or Asn or Absent or Gln or Tyr
  misc_feature (388)..(388): Cys or Absent or Gly or Ser or Ile or Val
  misc_feature (392)..(392): Ser or Thr or Asn or Met or Absent or Ile
  misc_feature (393)..(393): Glu or Asn or Thr or Gln or Absent or Asp
  misc_feature (394)..(394): Absent or Gly
  misc_feature (395)..(395): Absent or Met
  misc_feature (396)..(396): Absent or Lys
  misc_feature (397)..(397): Absent or Arg
  misc_feature (398)..(398): Absent or Phe
  misc_feature (399)..(399): Absent or Glu
  misc_feature (400)..(400): Absent or Glu
  misc_feature (401)..(401): Absent or Ser
  misc_feature (402)..(402): Absent or Val
  misc_feature (403)..(403): Absent or Met
  misc_feature (404)..(404): Absent or Leu
  misc_feature (405)..(405): Absent or Lys
  misc_feature (406)..(406): Absent or Phe
  misc_feature (407)..(407): Absent or Leu
  misc_feature (408)..(408): Absent or Leu
  misc_feature (409)..(409): Absent or Leu
  misc_feature (410)..(410): Absent or Gly
  misc_feature (411)..(411): Absent or Pro
  misc_feature (412)..(412): Absent or Tyr
  misc_feature (413)..(413): Absent or Asn
  misc_feature (414)..(414): Absent or Ser
  misc_feature (415)..(415): Absent or Ile
  misc_feature (416)..(416): Absent or Phe
  misc_feature (417)..(417): Absent or Phe
  misc_feature (418)..(418): Absent or Glu
  misc_feature (419)..(419): Absent or Leu
  misc_feature (420)..(420): Absent or Phe
  misc_feature (421)..(421): Absent or Ile
  misc_feature (422)..(422): Absent or Leu
  misc_feature (424)..(424): Val or Ala or Leu or Absent
  misc_feature (428)..(428): Ser or Ile or Absent or Leu or Trp or Thr
  misc_feature (429)..(429): Lys or Gln or Absent or Ile or Phe or Leu
  misc_feature (430)..(430): Lys or Glu or Asp or Arg or Absent or Gln or Ala
  misc_feature (431)..(431): Phe or Ser or Ala or Thr or Met or Leu or Absent or Pro
  misc_feature (432)..(432): Ile or Met or Leu or Absent or Gly or Ala or X
  misc_feature (433)..(433): Ile or Leu or Phe or Glu or Absent or Val or Met
  misc_feature (434)..(434): Glu or Ala or Gln or Lys or Absent or Asn
  misc_feature (435)..(435): Arg or Lys or Glu or Met or Thr or Absent or Val or Gly
  misc_feature (436)..(436): Leu or Val or Absent or Ser or Pro
  misc_feature (437)..(437): Pro or Lys or Thr or Gly or Absent or Arg
  misc_feature (438)..(438): Asn or Asp or Arg or Gly or Absent or Tyr
  misc_feature (439)..(439): Ala or Ser or Leu or Absent or Gly or Arg or Glu or Asn
  misc_feature (440)..(440): Ile or Thr or Lys or Val or Met or Asn or Absent
  misc_feature (441)..(441): Gln or Leu or Ser or Thr or Absent or Pro or Ala
  misc_feature (442)..(442): Leu or Phe or Ile or Gln or Absent or Gly or Arg
  misc_feature (443)..(443): Absent or X or Ile or Asn or Glu or Thr or Asp or Lys
  misc_feature (444)..(444): Absent or Val or Gln or Ser or His or Asn or Tyr
  misc_feature (445)..(445): Absent or Leu or Phe
  misc_feature (446)..(446): Absent or Val or Asp or Gly
  misc_feature (447)..(447): Absent or Ser
  misc_feature (448)..(448): Absent or Thr
  misc_feature (449)..(449): Absent or Trp
  misc_feature (450)..(450): Absent or Glu
  misc_feature (451)..(451): Absent or Glu
  misc_feature (452)..(452): Absent or His
  misc_feature (453)..(453): Glu or Gln or Absent or Val or Ile or Leu or Ala
  misc_feature (454)..(454): Glu or Gly or Gln or Lys or Absent or Val or Ser
  misc_feature (455)..(455): Ala or Val or Glu or Trp or Absent
  misc_feature (456)..(456): Val or Asp or Ser or Asn or Thr or Ile or Absent or His
  misc_feature (457)..(457): Glu or Gly or Ser or Absent or Thr or Ile
  misc_feature (458)..(458): Lys or Arg or Asn or Val or Glu or Absent
  misc_feature (459)..(459): Asp or Asn or Val or Absent or Ser or Ala
  misc_feature (460)..(460): Leu or Ser or Thr or Ala or Absent or Val or Gln
  misc_feature (461)..(461): Pro or Leu or Absent or Thr or Ala or Ser or Cys or His or Asp
  misc_feature (462)..(462): Leu or His or Lys or Pro or Thr or Tyr or Cys or Absent
  misc_feature (463)..(463): Asp or Ala or Glu or Arg or Ser or Absent or Cys
  misc_feature (464)..(464): His or Gln or Pro or Thr or Gly or Absent
  misc_feature (465)..(465): Lys or Glu or Asp or Ser or Pro or Gly or Arg or Absent
  misc_feature (466)..(466): His or Gly or Arg or Ile or Lys or Glu or Gln or Absent
  misc_feature (468)..(468): Thr or Ala or Phe or Val or Met or Absent
  misc_feature (469)..(469): Leu or Val or Ile or Met or Absent
  misc_feature (471)..(471): Phe or Leu or Cys or Absent
  misc_feature (472)..(472): Ala or Leu or Ile or Absent
  misc_feature (474)..(474): Val or Ile or Tyr or Ser or Gly or Absent
  misc_feature (480)..(480): Ala or Gly or Ser or Absent
  misc_feature (481)..(481): Ile or Val or Absent
  misc_feature (486)..(486): Asn or Arg or Ser or Absent
  misc_feature (487)..(487): Leu or Val or Ile or Tyr or Absent
  misc_feature (489)..(489): Phe or Leu or Cys or Tyr or Absent
  misc_feature (490)..(490): Met or Val or Gln or Ala or Ser or Absent
  misc_feature (491)..(491): Asn or Lys or Glu or Arg or Thr or Ala or Asp or Absent or Ser
  misc_feature (492)..(492): Tyr or Asn or His or Thr or Cys or Phe or Absent
  misc_feature (493)..(493): Met or Ser or Leu or Cys or Phe or Absent or Val
  misc_feature (494)..(494): Lys or Gln or Asn or Absent
  misc_feature (495)..(495): Ser or Val or Arg or Lys or Gly or Absent
  misc_feature (496)..(496): Ala or His or Arg or Ser or Ile or Asp or Asn or Absent
  misc_feature (497)..(497): Lys or Asn or Asp or Glu or His or Ala or Thr or Ser or Absent or Arg
  misc_feature (498)..(498): Thr or Ser or Leu or Pro or Absent or His or Tyr or Asn
  misc_feature (499)..(499): Absent or Gly or Glu or Thr
  misc_feature (500)..(500): Asn or Gly or Lys or Glu or Absent or Asp or Ala or Gln or Cys
  misc_feature (501)..(501): Ile or Ala or Gly or Asp or Gln or Absent or Glu
  misc_feature (502)..(502): Absent or Asp or Tyr
  misc_feature (503)..(503): Absent or Val
  misc_feature (504)..(504): Absent or Lys
  misc_feature (505)..(505): Absent or Ser
  misc_feature (506)..(506): Absent or Glu
  misc_feature (507)..(507): Absent or Val or Glu
  misc_feature (508)..(508): Absent or Asn
  misc_feature (509)..(509): Absent or Val
  misc_feature (510)..(510): Absent or Lys
  misc_feature (511)..(511): Absent or Ser
  misc_feature (512)..(512): Absent or Glu
  misc_feature (513)..(513): Absent or Glu
  misc_feature (514)..(514): Absent or Asn
  misc_feature (515)..(515): Gly or Glu or Ser or Asp or Absent or Val
  misc_feature (516)..(516): Gln or Ser or Leu or Glu or Lys or His or Absent or Asn
  misc_feature (517)..(517): Absent or Lys or Ala or Asp or Gly or Ile or Ser or Arg or Asn
  misc_feature (518)..(518): Glu or Leu or Asp or Lys or Absent
  misc_feature (519)..(519): Glu or Gln or Ser or Absent or Asn or Asp or Leu or Ile or Pro
  misc_feature (520)..(520): Val or Ile or Phe or Lys or Ala or Thr or Absent
  misc_feature (524)..(524): Ala or Pro or Ser or Absent or Thr
  misc_feature (525)..(525): His or Asn or Gln or Asp or Absent
  misc_feature (527)..(527): Asp or Thr or Ala or Asn or Absent or Ser
  misc_feature (528)..(528): Glu or Lys or Asp or Arg or His or Ser or Ala or Gly or Absent
  misc_feature (531)..(531): Arg or Lys or Gln or Glu or Absent
  misc_feature (532)..(532): Thr or Ala or Ile or Val or Absent or Ser
  misc_feature (533)..(533): Leu or Val or Ala or Absent or Ile
  misc_feature (535)..(535): Tyr or Cys or Leu or Ser or Glu or Thr or Absent
  misc_feature (536)..(536): Lys or Gly or Arg or Phe or Ser or Asn or Ala or Absent
  misc_feature (539)..(539): Asp or Glu or Absent or Val
  misc_feature (549)..(549): Val or Ala or Absent or Ile or Thr or Gly
  misc_feature (551)..(551): Cys or Absent or Ser or Phe
  misc_feature (566)..(566): Val or Ile or Absent or Met
  misc_feature (567)..(567): His or Absent or Tyr
  misc_feature (570)..(570): Pro or Absent or Ser or Thr or Met
  misc_feature (572)..(572): Lys or Absent or Asn or Glu
  misc_feature (573)..(573): Ser or Absent or Phe or Tyr or Pro
  misc_feature (575)..(575): Arg or Lys or Absent or Thr
  misc_feature (578)..(578): Ser or Absent or Thr or Ala
  misc_feature (579)..(579): Leu or Absent or Ile
  misc_feature (580)..(580): Ile or Val or Leu or Absent or Met
  misc_feature (583)..(583): Ile or Absent or Val or Leu or Phe
  misc_feature (584)..(584): Tyr or Absent or Asn or His or Asp
  misc_feature (585)..(585): Lys or Absent or Asn or Glu or Gln or Arg
  misc_feature (587)..(587): Thr or Ser or Absent
  misc_feature (588)..(588): Thr or Ile or Met or Absent or Lys or Gly or Arg
  misc_feature (589)..(589): Val or Absent or Lys
  misc_feature (590)..(590): Asn or Arg or His or Absent or Tyr
  misc_feature (593)..(593): Gly or Tyr or Absent or Phe
  misc_feature (595)..(595): Absent or Lys or Thr or Val or Glu
  misc_feature (596)..(596): Absent or X or Asn
  misc_feature (597)..(597): Absent or Lys or Met
  misc_feature (598)..(598): Absent or Arg or Met
  misc_feature (599)..(599): Absent or Asn
  misc_feature (600)..(600): Absent or Leu
  misc_feature (601)..(601): Absent or Glu
  misc_feature (602)..(602): Absent or Val
  misc_feature (603)..(603): Absent or Val
  misc_feature (604)..(604): Absent or Asn
  misc_feature (605)..(605): Absent or Cys
  misc_feature (606)..(606): Absent or Ala
  misc_feature (607)..(607): Absent or Ser
  misc_feature (608)..(608): Absent or Thr
  misc_feature (609)..(609): Absent or Lys
  misc_feature (610)..(610): Absent or His
  misc_feature (611)..(611): Absent or Arg
  misc_feature (612)..(612): Absent or Arg
  misc_feature (613)..(613): Absent or Glu
  misc_feature (614)..(614): Absent or Glu
  unsure (1)..(614): unsure at all Xaa locations
XXXXXXXXXXXXXXXXXXXXXXXXXXXXXXXXXXXXXXXXXXXXXXXXXXXXXXXXXXXXXXXXXXXXXXXXXXXXXXXXXXXXXXXXXXXXXXXXXXXXXXXXXXXXXXXXXXXXXXXXXXXXXXXXXXXXXXXXXXXXXXXXXXXXXXXXXXXXXXXXXXXXXXXXXXXXXXXXXXXXXXXXXXXXXXXXXXXXXXXXXXXXXXXXXXXXXXIXXLXLXLLWXXXXXXXXXHXXXSXXXXXXXXXXXXXXXXXXXXXXXXXXXXXXXXXXXXXXXXXXXXXXXXXXXXXXXXXXXXXXXXXXXXXXXXXXXXXXXXXXXXXXXXXXXXXXEXYXISXGLXXKYXXXXXXXLXXLAXVXXSXEAXXXXXXXXXLLXWLXXXGVKXVXLYDXXXXXXXXXXXXXXXXXXXXXXXXXXXXXXXGXLKKXXXXXXXXXXXXXXXXXXXXXXXXXXXXXXXXXXXXXXXMXXEXXSXSDGKEXXAKAAXXLXXXXXXXXXXXXXXXXXXXXXXXXXXXXXXXXFTEXXMXXALXXXGXXGPXPDLLLVYGPXRXHLGFPAWRLRYTEIXXMGXLXXMXYGXXXKAXXXFXXXXQNXGXXXXXXXXXXXXXXXXXXXX

SEQ ID NO: 36473 - protein, 656 aa, Artificial sequence
  consensus sequence of seq id no: 559  and its homologs
  misc_feature (1)..(1): Absent or Met
  misc_feature (2)..(2): Absent or Leu
  misc_feature (3)..(3): Absent or His
  misc_feature (4)..(4): Absent or Val
  misc_feature (5)..(5): Absent or Pro
  misc_feature (6)..(6): Absent or Ile
  misc_feature (7)..(7): Absent or Thr
  misc_feature (8)..(8): Absent or Ser
  misc_feature (9)..(9): Absent or Val
  misc_feature (10)..(10): Absent or Ala
  misc_feature (11)..(11): Absent or Ile
  misc_feature (12)..(12): Absent or Ser
  misc_feature (13)..(13): Absent or Glu
  misc_feature (14)..(14): Absent or Gln
  misc_feature (15)..(15): Absent or Arg
  misc_feature (16)..(16): Absent or Gln
  misc_feature (17)..(17): Absent or Ile
  misc_feature (18)..(18): Absent or Leu
  misc_feature (19)..(19): Absent or Asn
  misc_feature (20)..(20): Absent or Leu
  misc_feature (21)..(21): Absent or Phe
  misc_feature (22)..(22): Absent or Phe
  misc_feature (23)..(23): Absent or Cys
  misc_feature (24)..(24): Absent or Phe
  misc_feature (25)..(25): Absent or Met or Ser
  misc_feature (26)..(26): Absent or Glu or Phe
  misc_feature (27)..(27): Absent or Leu or Val or Met
  misc_feature (28)..(28): Absent or Met or Pro or Leu or Glu
  misc_feature (29)..(29): Absent or Glu or Leu
  misc_feature (30)..(30): Absent or Leu or Val or Ala
  misc_feature (31)..(31): Absent or Ala or Phe or Leu or Met
  misc_feature (32)..(32): Absent or Pro or Arg or Asn or Glu or Val
  misc_feature (33)..(33): Absent or Phe or Thr or Met or Leu or Ser
  misc_feature (34)..(34): Absent or Ala or Pro or Glu or Gly or Arg
  misc_feature (35)..(35): Absent or Ala or Ser or Leu or Lys or Thr
  misc_feature (36)..(36): Absent or Ala or His or Leu or Pro
  misc_feature (37)..(37): Absent or Ser or Val or Leu or Asn
  misc_feature (38)..(38): Absent or Ser or Leu or Gln or Met
  misc_feature (39)..(39): Absent or Ser or Thr or Arg or Ala or Glu
  misc_feature (40)..(40): Absent or Ser or Ala or Leu or His or Ile
  misc_feature (41)..(41): Absent or Ser or Thr or Arg or Ala or Pro
  misc_feature (42)..(42): Absent or Ser or Ala or Pro or Cys or Leu
  misc_feature (43)..(43): Absent or Ser or Thr or Phe or Ile
  misc_feature (44)..(44): Absent or Thr or Ala or Pro or Ser
  misc_feature (45)..(45): Absent or Val or Thr or Ser or Tyr or Gly or Arg
  misc_feature (46)..(46): Absent or Thr or Ser or Ala or Tyr or Gly
  misc_feature (47)..(47): Absent or Asn or Ser or Thr or Ile or Pro
  misc_feature (48)..(48): Absent or Thr or Phe or Ala or His
  misc_feature (49)..(49): Absent or Cys or Arg or Ser or Thr or Pro
  misc_feature (50)..(50): Absent or Lys or Val or Ser or Tyr or Phe or Pro
  misc_feature (51)..(51): Absent or Leu or Gly or Thr or Ser
  misc_feature (52)..(52): Absent or Arg or Ala or Pro or His or Thr
  misc_feature (53)..(53): Absent or Leu or Trp or Ala or Cys or Ile or Ser
  misc_feature (54)..(54): Absent or Arg or Phe or Ala or Ser
  misc_feature (55)..(55): Absent or Leu or Ser or Ile or Asn or Cys
  misc_feature (56)..(56): Absent or Ser or Lys or Ala or Gly or Phe
  misc_feature (57)..(57): Absent or Tyr or Thr or His or Phe or Ala or Ser
  misc_feature (58)..(58): Absent or Thr or Ser or Cys or Ala
  misc_feature (59)..(59): Absent or His or Asp or Ser or Pro or Ala or Gly
  misc_feature (60)..(60): Absent or Cys or Leu or Lys or Arg or Gly
  misc_feature (61)..(61): Absent or Ser or Pro or Leu or Val or Lys or Ala
  misc_feature (62)..(62): Absent or Ile or Ala or Cys or Arg or Val or Gly
  misc_feature (63)..(63): Absent or Gly or Ser or Glu or Ala or Arg or Phe
  misc_feature (64)..(64): Absent or Phe or Arg or Thr or Asp or Cys
  misc_feature (65)..(65): Absent or Ala or Arg or Gln or Ser or Gly or Val
  misc_feature (66)..(66): Absent or Pro or Arg or Cys or Ser or Tyr or Leu
  misc_feature (67)..(67): Absent or Arg or Leu or Trp or Asn or Pro
  misc_feature (68)..(68): Absent or Val or Asn or Lys or Ile or Ala
  misc_feature (69)..(69): Absent or Arg or Leu or Lys or Asn or Thr
  misc_feature (70)..(70): Absent or Arg or Lys or Ala or Asn
  misc_feature (71)..(71): Absent or Trp or Glu or Lys or Ala or Asn
  misc_feature (72)..(72): Absent or Ile or Asn or Ala or Val or Arg
  misc_feature (73)..(73): Absent or Arg or Gly or Cys or Glu or Asn
  misc_feature (74)..(74): Absent or Ala or Val or Phe or Gly or Asn or Glu
  misc_feature (75)..(75): Absent or Ala or Asn or Asp or Gly or Arg or Ser
  misc_feature (76)..(76): Absent or Ala or Arg or Asp or Lys
  misc_feature (77)..(77): Absent or Glu or Ile or Pro or Gly or Val or Arg
  misc_feature (78)..(78): Absent or Gly or Gln or Arg or Val or Cys
  misc_feature (79)..(79): Absent or Arg or Ile or Leu or Ala or Gln or Phe
  misc_feature (80)..(80): Absent or Gly or Arg or Ala or Asp or Val
  misc_feature (81)..(81): Absent or Gly or Cys or Val or Arg
  misc_feature (82)..(82): Absent or Asp or Ser or Arg or Cys or Phe
  misc_feature (83)..(83): Absent or Gln or Lys or Cys or Arg or Ala or Val
  misc_feature (84)..(84): Absent or Arg or Ala or Val or Lys
  misc_feature (85)..(85): Absent or Arg or Ser or Lys or Gly or Ala
  misc_feature (86)..(86): Absent or Ser or Thr or Ala
  misc_feature (87)..(87): Absent or Gly or Glu or Ser or Ala
  misc_feature (88)..(88): Absent or Arg or Ala or Phe or Glu
  misc_feature (89)..(89): Absent or Leu or Thr or Glu or Gln or Gly or Ala or Ser or Arg
  misc_feature (90)..(90): Absent or Ala or Gly or Arg or Asp or Ser
  misc_feature (91)..(91): Absent or Ala or Thr or Asp or Ser or Arg
  misc_feature (92)..(92): Absent or Asp or Gly or Arg or Ser or Glu
  misc_feature (93)..(93): Absent or Gly or Ser or Asp or Pro or Glu
  misc_feature (94)..(94): Absent or Pro or Glu or Thr or Lys or Arg or Gly or Ile
  misc_feature (95)..(95): Absent or Arg or Gly or Ile or Val or Met or Asp
  misc_feature (96)..(96): Absent or Val or Ile or Asp or Lys or Gly
  misc_feature (97)..(97): Absent or Val or Glu or Asp or Gly
  misc_feature (98)..(98): Absent or Glu or Gly or Val or Arg
  misc_feature (99)..(99): Absent or Val or Arg or Glu or Thr or Ala
  misc_feature (100)..(100): Absent or Ala or Glu or Thr or Gly
  misc_feature (101)..(101): Absent or Ala or Arg or Thr or Glu
  misc_feature (102)..(102): Absent or Pro or Arg or Ser or Thr
  misc_feature (103)..(103): Absent or Pro or Arg or Gly or Val
  misc_feature (104)..(104): Absent or Ala or Phe or Met or Gly
  misc_feature (105)..(105): Absent or Ala or Thr or Gln or Gly
  misc_feature (106)..(106): Absent or Pro or Gly or Thr or Ala or Ser or Phe
  misc_feature (107)..(107): Absent or Val or Ser or Pro or Leu or Gly or Thr
  misc_feature (108)..(108): Absent or Val or Ala or Asp or Gly or Ser
  misc_feature (109)..(109): Absent or Thr or Met or Ala or Ser or Pro
  misc_feature (110)..(110): Absent or Gly or Glu or Asn or Ala
  misc_feature (111)..(111): Absent or Gly or Val or Trp or Met
  misc_feature (112)..(112): Absent or Gly or Thr or Asn or Ala or Glu
  misc_feature (113)..(113): Absent or Gly or Thr or Val or Ala
  misc_feature (114)..(114): Absent or Gly or Phe or Asp or Thr
  misc_feature (115)..(115): Absent or Gly or Asp or Asn or Leu or Ser or Thr
  misc_feature (116)..(116): Absent or Gly or Gln or Arg or Ala or Phe or Leu
  misc_feature (117)..(117): Absent or Gly or Ser or Thr or Gln or Asp or Asn
  misc_feature (118)..(118): Absent or Phe or Thr or Ser or Arg
  misc_feature (119)..(119): Absent or Ala or Gly or Phe or Asn or Ser
  misc_feature (120)..(120): Absent or Ala or Asp or Ser or Thr or Gln or Phe
  misc_feature (121)..(121): Absent or Arg or Ala or Asp or Ser or Thr or Asn
  misc_feature (122)..(122): Absent or Asp or Ala or Ser or Glu
  misc_feature (123)..(123): Absent or Ala or Ser or Glu or Thr
  misc_feature (124)..(124): Absent or Glu or Asp or Thr
  misc_feature (125)..(125): Absent or Leu or Phe or Glu
  misc_feature (126)..(126): Absent or Ala or Pro
  misc_feature (127)..(127): Absent or Met or Leu or Val or Ser
  misc_feature (128)..(128): Absent or Trp
  misc_feature (129)..(129): Absent or Glu or Gly or Asp
  misc_feature (130)..(130): Absent or Arg or Lys or Gln
  misc_feature (131)..(131): Absent or Leu or Ile
  misc_feature (132)..(132): Absent or Gly or Ser
  misc_feature (133)..(133): Absent or Ala or Met
  misc_feature (134)..(134): Absent or Val or Ile
  misc_feature (135)..(135): Absent or Val or Phe
  misc_feature (136)..(136): Absent or Arg
  misc_feature (137)..(137): Absent or Leu or Ile
  misc_feature (138)..(138): Absent or Ser or Cys or Val
  misc_feature (139)..(139): Absent or Tyr
  misc_feature (140)..(140): Absent or Gly or Ser
  misc_feature (141)..(141): Absent or Ile or Leu
  misc_feature (142)..(142): Absent or Gly or Ala
  misc_feature (143)..(143): Absent or Ile or Met
  misc_feature (144)..(144): Absent or Tyr
  misc_feature (145)..(145): Absent or Ala or Gly
  misc_feature (146)..(146): Absent or Ala or Gly
  misc_feature (147)..(147): Absent or Met or Leu
  misc_feature (148)..(148): Absent or Ala
  misc_feature (149)..(149): Absent or Leu or Val or Phe
  misc_feature (150)..(150): Absent or Thr or Ala or Val
  misc_feature (151)..(151): Absent or Gly
  misc_feature (152)..(152): Absent or Arg or Ser or Asn
  misc_feature (153)..(153): Absent or Phe or Val
  misc_feature (154)..(154): Absent or Ile
  misc_feature (155)..(155): Absent or Cys
  misc_feature (156)..(156): Absent or Gln or Ser or Gly
  misc_feature (157)..(157): Absent or Met or Ile or Phe
  misc_feature (158)..(158): Absent or Ala or Thr
  misc_feature (159)..(159): Absent or Gly
  misc_feature (160)..(160): Absent or Ile or Val
  misc_feature (161)..(161): Absent or Asp
  misc_feature (162)..(162): Absent or Cys or Ser or Leu
  misc_feature (163)..(163): Absent or Thr or Leu or Trp or Met
  misc_feature (164)..(164): Absent or Gly
  misc_feature (165)..(165): Absent or Gly
  misc_feature (166)..(166): Absent or Phe
  misc_feature (167)..(167): Absent or His or Asn or Asp or Glu
  misc_feature (168)..(168): Absent or Pro or Leu or Ile
  misc_feature (169)..(169): Absent or Ser or Thr
  misc_feature (170)..(170): Absent or Leu or Pro
  misc_feature (171)..(171): Absent or Ser or Asp or Gln or Thr
  misc_feature (172)..(172): Absent or Ala or Val
  misc_feature (173)..(173): Absent or Leu or Phe or Ile or Val
  misc_feature (174)..(174): Absent or Val or Leu or Thr
  misc_feature (175)..(175): Absent or Glu or Thr
  misc_feature (176)..(176): Absent or Gly
  misc_feature (177)..(177): Absent or Leu or Phe
  misc_feature (178)..(178): Absent or Gly
  misc_feature (179)..(179): Absent or Tyr
  misc_feature (180)..(180): Absent or Ala
  misc_feature (181)..(181): Absent or Ala or Val or Ser
  misc_feature (182)..(182): Absent or Pro
  misc_feature (183)..(183): Absent or Pro
  misc_feature (184)..(184): Absent or Ile or Val or Met
  misc_feature (185)..(185): Absent or Met
  misc_feature (186)..(186): Absent or Ala or Met or Val
  misc_feature (187)..(187): Absent or Leu
  misc_feature (188)..(188): Absent or Leu
  misc_feature (189)..(189): Absent or Phe
  misc_feature (190)..(190): Absent or Ile
  misc_feature (191)..(191): Absent or Leu
  misc_feature (192)..(192): Absent or Asp or Glu
  misc_feature (193)..(193): Absent or Asp
  misc_feature (194)..(194): Absent or Glu
  misc_feature (195)..(195): Absent or Val or Ile
  misc_feature (196)..(196): Absent or Val
  misc_feature (197)..(197): Absent or Lys
  misc_feature (198)..(198): Absent or Tyr or Leu or Ser or Val
  misc_feature (199)..(199): Absent or Ser or Trp
  misc_feature (200)..(200): Absent or Pro or Ala or Gly
  misc_feature (201)..(201): Absent or Met or Gly or His or Pro
  misc_feature (202)..(202): Absent or Glu or Ala
  misc_feature (203)..(203): Absent or Leu or Gly or Arg
  misc_feature (204)..(204): Absent or Ala or Asp
  misc_feature (205)..(205): Absent or Pro or Ile
  misc_feature (206)..(206): Absent or Met or Phe or Trp or Arg
  misc_feature (207)..(207): Absent or Glu or Ala or Ser or Asp
  misc_feature (208)..(208): Absent or Leu or Ala or Trp or Val
  misc_feature (209)..(209): Absent or Ala or Glu or Gly
  misc_feature (210)..(210): Absent or Ala or Pro or Ser or Lys or Asp
  misc_feature (211)..(211): Absent or Pro or Ser or Glu
  misc_feature (212)..(212): Absent or Cys or Ser or Phe or Leu or Glu
  misc_feature (213)..(213): Absent or Ser or Arg or Leu or Met or Ile
  misc_feature (214)..(214): Absent or Phe or Ser or Arg or Ala or Trp or Met
  misc_feature (215)..(215): Absent or Ser or Thr or His or Asn or Asp
  misc_feature (216)..(216): Absent or Cys or Ser or Gly or Arg or Phe
  misc_feature (217)..(217): Absent or Thr or Phe or Leu or Ile
  misc_feature (218)..(218): Absent or Val or Tyr or X or Cys or Ala
  misc_feature (219)..(219): Absent or Thr or Gly
  misc_feature (220)..(220): Absent or Asn or Met
  misc_feature (221)..(221): Absent or Thr or Ser or Ala
  misc_feature (222)..(222): Absent or Cys or Pro or Asp
  misc_feature (223)..(223): Absent or Lys or Trp or Met
  misc_feature (224)..(224): Absent or Leu or Val or Cys or Gln or Glu
  misc_feature (225)..(225): Absent or Arg or Phe or Ser or Leu
  misc_feature (226)..(226): Absent or Leu or Phe or Tyr or Ile or Pro or Met
  misc_feature (227)..(227): Absent or Arg or Phe or Thr or Leu
  misc_feature (228)..(228): Absent or Ser or Leu or Val or Ala or Ile or Met
  misc_feature (229)..(229): Absent or Ser or Thr or Val or Ala
  misc_feature (230)..(230): Absent or Tyr or Thr or Ala or Val
  misc_feature (231)..(231): Absent or Thr or Ala
  misc_feature (232)..(232): Absent or His or Asn or Ser or Gly
  misc_feature (233)..(233): Absent or Cys or Ser or Ala
  misc_feature (234)..(234): Absent or Ser or Ile or Val or Ala
  misc_feature (235)..(235): Absent or Ile or Gly or Ala or Ser
  misc_feature (236)..(236): Absent or Gly or Glu
  misc_feature (237)..(237): Absent or Ile or Phe or Trp or Glu
  misc_feature (238)..(238): Absent or Thr or Ala or Cys or Ser or Leu
  misc_feature (239)..(239): Absent or Pro or Phe or Leu
  misc_feature (240)..(240): Absent or Ala or Tyr or Phe or Ser
  misc_feature (242)..(242): Absent or Ala or Val or Thr
  misc_feature (243)..(243): Absent or Leu or Arg or Val or Ala or Gly
  misc_feature (244)..(244): Absent or Arg or Val or Ile or Leu
  misc_feature (245)..(245): Absent or Ala or Thr or Gln or Lys or His or Cys
  misc_feature (246)..(246): Absent or Gly or Ser
  misc_feature (247)..(247): Absent or Ala or Pro or Gly or Ser
  misc_feature (248)..(248): Absent or Gly or Leu or Ser
  misc_feature (249)..(249): Absent or Ala or Val or Thr or Ser
  misc_feature (250)..(250): Absent or Trp or Ser or Asp or His
  misc_feature (251)..(251): Absent or Arg or Trp or Ile or Ala or Ser
  misc_feature (252)..(252): Absent or Leu or Val or Ile or Phe or X or Ser
  misc_feature (253)..(253): Absent or Arg or Leu or Phe or Gln or Thr
  misc_feature (254)..(254): Absent or Ala or Arg or Ile or Met or Ser
  misc_feature (255)..(255): Absent or Gly or Ala or Ser or Ile
  misc_feature (256)..(256): Absent or Ala or Thr or Ser or Asp or Tyr or Asn
  misc_feature (257)..(257): Absent or His or Glu or Asn or Lys or Asp
  misc_feature (258)..(258): Absent or His or Gln or Glu or Leu or Ile or Gly or Ser or Phe
  misc_feature (259)..(259): Absent or Gly or Met or Ile or Val or Pro or Leu
  misc_feature (260)..(260): Absent or Gly or Arg or Lys or Glu or Thr or Ala
  misc_feature (261)..(261): Absent or Gly or Asp or Arg
  misc_feature (262)..(262): Absent or Asp or Gly or Ala or Val or Ser or Arg
  misc_feature (263)..(263): Absent or Gly or Arg or Gln or Thr
  misc_feature (264)..(264): Absent or Val or Gly or Ala or Ser
  misc_feature (265)..(265): Absent or Glu or Asp or Gly or Leu
  misc_feature (266)..(266): Absent or Pro or Gln or Arg or Ile or Met or Leu or Lys
  misc_feature (267)..(267): Absent or Gly or Arg or Ala or Val or Thr or Leu or Met
  misc_feature (268)..(268): Absent or Arg or Ser or X or Ala
  misc_feature (269)..(269): Absent or Pro or Ser or Arg or Leu or Phe
  misc_feature (270)..(270): Absent or Ala or Gly or Ser or Thr or Ile or Asn
  misc_feature (271)..(271): Absent or Gly or Arg or Ala or Val
  misc_feature (272)..(272): Absent or Arg or Ser or Met or Val or Leu or Ile or Gly
  misc_feature (273)..(273): Absent or Leu or Phe or Val or Ile or Glu or Asp
  misc_feature (274)..(274): Absent or Ala or Pro or Phe or Arg or Asn
  misc_feature (275)..(275): Absent or Ala or Pro or Thr or Leu or Ser
  misc_feature (276)..(276): Absent or Asp or Phe or Leu or Arg
  misc_feature (277)..(277): Absent or Gly or Val or Asp or Ser
  misc_feature (279)..(279): Absent or Pro or Arg or Phe or Tyr or Ile
  misc_feature (280)..(280): Absent or Val or Gly or Ala
  misc_feature (281)..(281): Absent or Val or Gln or Ser
  misc_feature (282)..(282): Absent or Asp or Glu or Thr or Ala or Phe
  misc_feature (283)..(283): Absent or Val or Gly or Phe or Ile or Glu
  misc_feature (284)..(284): Absent or Pro or Ala or Gly or Arg
  misc_feature (286)..(286): Absent or Val or Pro or Ala or Ser
  misc_feature (287)..(287): Absent or Val or Pro or Ile or Leu or Asn or Glu
  misc_feature (288)..(288): Absent or Gly or Ala or Val or Thr
  misc_feature (290)..(290): Absent or Ala or Pro or Thr or Val or Glu
  misc_feature (291)..(291): Absent or Asp or Val or Ser or Leu or Ile or Lys
  misc_feature (292)..(292): Absent or Gly or Val or Thr or Asn
  misc_feature (293)..(293): Absent or Phe or Thr or Gly or Asn
  misc_feature (294)..(294): Absent or Gly or Ala or Ser or Thr or Asp
  misc_feature (295)..(295): Absent or Gly or Ala or Leu or Ile or Met or Thr
  misc_feature (296)..(296): Absent or Gly or Tyr or Val
  misc_feature (297)..(297): Absent or Gly or Ala or Tyr
  misc_feature (298)..(298): Absent or Gly or Ala or Val or Met or Ile
  misc_feature (299)..(299): Absent or Gly or Ala or Ile
  misc_feature (300)..(300): Absent or Ser or Thr or Ala
  misc_feature (301)..(301): Absent or Gly or Ala or Ser or Thr
  misc_feature (302)..(302): Absent or Gly or Pro
  misc_feature (303)..(303): Absent or Phe or Lys
  misc_feature (304)..(304): Absent or Gly or Ala or Asp
  misc_feature (305)..(305): Absent or Ala or Pro
  misc_feature (306)..(306): Absent or Arg or Thr or Lys
  misc_feature (307)..(307): Absent or Asp or Tyr or Arg
  misc_feature (308)..(308): Absent or Ala or Val or Pro
  misc_feature (309)..(309): Absent or Glu or Val or Ile
  misc_feature (310)..(310): Absent or Leu or Thr or Ala
  misc_feature (311)..(311): Absent or Ala or Pro
  misc_feature (312)..(312): Absent or Met or Ala or Val
  misc_feature (313)..(313): Absent or Trp or Met or Leu or Val
  misc_feature (314)..(314): Absent or Glu or Asp or Arg or Pro or Gln
  misc_feature (315)..(315): Absent or Lys or Arg or Ser or Gly
  misc_feature (316)..(316): Met or Leu or Asn or Tyr or Absent or Arg or His or Gln
  misc_feature (317)..(317): Asn or Gly or Thr or Ser or Absent or Ala
  misc_feature (318)..(318): Cys or Ala or Gly or Absent or Asn
  misc_feature (319)..(319): Phe or Val or Arg or Absent or Cys
  misc_feature (320)..(320): Val or Glu or Absent or Gln or Gly or Ile or Asp or Ala
  misc_feature (321)..(321): Ser or Arg or Asn or Asp or Absent
  misc_feature (322)..(322): Absent or Leu or Ile or Met
  misc_feature (323)..(323): Absent or Ser or Lys or Arg
  misc_feature (324)..(324): Absent or Tyr or Lys or Glu
  misc_feature (325)..(325): Absent or Gly or Leu or Arg
  misc_feature (326)..(326): Absent or Ile or Phe or Val
  misc_feature (327)..(327): Gly or Ala or Absent or Glu or Ser
  misc_feature (328)..(328): Ile or Ala or Absent
  misc_feature (329)..(329): Tyr or Trp or Absent
  misc_feature (330)..(330): Gly or Ala or Tyr or Absent
  misc_feature (331)..(331): Ala or Gly or Glu or Absent or Gln or Ser
  misc_feature (332)..(332): Met or Arg or Absent or Lys or Gly
  misc_feature (333)..(333): Ala or Arg or Absent or Gly
  misc_feature (334)..(334): Val or Leu or Gln or Absent or Gly
  misc_feature (335)..(335): Ala or Thr or Met or Absent or Gln
  misc_feature (336)..(336): Gly or Arg or Lys or Absent
  misc_feature (337)..(337): Ser or Arg or Lys or Absent or Gln
  misc_feature (338)..(338): Phe or Ala or Ile or Absent
  misc_feature (339)..(339): Ile or Tyr or Absent or Gly or Ala
  misc_feature (340)..(340): Cys or Ser or Absent or Ala or Gly
  misc_feature (341)..(341): Ser or Asp or Gln or Pro or Absent or Thr
  misc_feature (342)..(342): Ile or Met or Leu or Absent or Ala or Val
  misc_feature (343)..(343): Thr or Ala or Leu or Absent or Met
  misc_feature (344)..(344): Gly or Asp or Glu or Absent
  misc_feature (345)..(345): Ile or Gly or Absent or Ser
  misc_feature (346)..(346): Asp or Ile or Leu or Absent
  misc_feature (347)..(347): Ser or Cys or Leu or Absent
  misc_feature (348)..(348): Leu or Ser or Thr or Ala or Absent or Gly
  misc_feature (349)..(349): Gly or Phe or Leu or Absent or Met
  misc_feature (350)..(350): Gly or Tyr or Absent
  misc_feature (351)..(351): Phe or Val or Leu or Absent
  misc_feature (352)..(352): His or Gly or Absent
  misc_feature (353)..(353): Leu or Pro or Phe or Absent or Cys
  misc_feature (354)..(354): Ser or Glu or Absent
  misc_feature (355)..(355): Leu or Trp or Absent
  misc_feature (356)..(356): Asp or Lys or Thr or Ser or Ile or Absent or Met
  misc_feature (357)..(357): Ala or Gln or Absent or His or X
  misc_feature (358)..(358): Ile or Leu or Thr or Absent or Asn
  misc_feature (359)..(359): Leu or Val or Asp or Asn or Absent or Gly or X
  misc_feature (360)..(360): Glu or X or Asn or Absent or Tyr
  misc_feature (361)..(361): Gly or Ile or Absent or Val or Leu
  misc_feature (363)..(363): Gly or Ala or Absent or Thr or Val
  misc_feature (364)..(364): Tyr or Pro or Absent or Asp or Thr
  misc_feature (365)..(365): Ala or Thr or Met or Ile or Absent or Asn
  misc_feature (366)..(366): Ala or Ser or Ile or Absent or Leu
  misc_feature (367)..(367): Pro or Thr or Absent or Leu or Asp
  misc_feature (368)..(368): Pro or His or Absent or Ala or Arg
  misc_feature (369)..(369): Ile or Gly or Absent or Pro or Thr
  misc_feature (370)..(370): Met or Ile or Absent or Leu or Phe
  misc_feature (371)..(371): Ala or Gly or Tyr or Absent or Ile
  misc_feature (372)..(372): Leu or Absent or Ser or Thr or Asn
  misc_feature (373)..(373): Leu or Absent or Thr or Ala or His or Ser
  misc_feature (374)..(374): Phe or Ala or Val or Absent or Gly or Thr
  misc_feature (375)..(375): Ile or Ala or Val or Absent or Thr
  misc_feature (377)..(377): Asp or Pro or Cys or Gly or Absent or Ser
  misc_feature (378)..(378): Asp or Ser or His or Absent or Thr or Asn or Phe
  misc_feature (379)..(379): Glu or Trp or X or Gly or Absent or Val or Pro
  misc_feature (380)..(380): Val or Thr or Leu or Absent or Ile
  misc_feature (381)..(381): Val or Thr or Arg or Trp or Absent or Leu
  misc_feature (382)..(382): Lys or Arg or Gln or Absent or Gly or Asp or X
  misc_feature (383)..(383): Leu or Gly or Tyr or Absent or Ile or His or Lys
  misc_feature (384)..(384): Ser or Absent or His or Asn or Gly or Gln or Ile or Leu
  misc_feature (385)..(385): Pro or Ser or Absent or Asp or Glu or Leu or His or Gly
  misc_feature (386)..(386): Met or Tyr or Phe or X or Absent or His or Trp or Asn or Ala
  misc_feature (387)..(387): Val or Cys or Ala or His or Absent or Arg or Lys or Gln or Leu
  misc_feature (388)..(388): Tyr or Pro or Absent or Gly or Ala or Arg or Ile or Glu or Val or Gln
  misc_feature (390)..(390): Absent or Pro or Ala or Leu or Asp
  misc_feature (391)..(391): Absent or Ala or Ile or Arg or His or Thr
  misc_feature (392)..(392): Absent or Pro or Arg or Gln or Leu or Tyr
  misc_feature (393)..(393): Absent or Phe or Tyr or Asp or Arg or Gly
  misc_feature (394)..(394): Absent or Cys or Leu or Val or Ile or Arg
  misc_feature (395)..(395): Absent or Pro or Glu or Gln or Leu or Asn or Ser or Arg or Gly
  misc_feature (396)..(396): Absent or Cys or Arg or Asp or Glu or Leu or Gln or Lys or Ile
  misc_feature (397)..(397): Absent or Arg or Tyr or Glu or Ile or Leu or Gln or Val
  misc_feature (398)..(398): Absent or Asn or Arg or Glu or Lys or Ser or Gly
  misc_feature (399)..(399): Absent or Ala or Asp or Leu or Gln or Ser or Ile or Gly or Val or Arg or Phe or Thr
  misc_feature (400)..(400): Absent or Thr or Ser or Arg or Glu or Gln or Gly or Asp or Met
  misc_feature (401)..(401): Absent or Ser or Ala or Gly or Glu or Gln or Arg or Val
  misc_feature (402)..(402): Absent or Pro or Ile or Phe or Thr or Met or Lys or Leu or Ser or Asp or Val
  misc_feature (403)..(403): Absent or Thr or Asn or Lys or Ala or Ser or Gly
  misc_feature (404)..(404): Absent or Ser or Phe or Asn or Arg or Lys or Gly
  misc_feature (405)..(405): Absent or Phe or Ser or Asn or Glu or Ile or Ala or Arg
  misc_feature (406)..(406): Absent or Pro or Asp or Lys or Glu or Gly or Phe
  misc_feature (407)..(407): Absent or Gly or Cys or Thr or Arg or Lys or Val or Ile
  misc_feature (408)..(408): Absent or Met or Ile or Leu or Asn or Gly or Cys
  misc_feature (409)..(409): Absent or Leu or Val or Ser or Glu
  misc_feature (410)..(410): Absent or Pro or Asn or Lys or Val
  misc_feature (411)..(411): Absent or Leu or Arg or Thr
  misc_feature (412)..(412): Absent or Asp or Ala or Ser or Gly
  misc_feature (413)..(413): Absent or Arg or Glu or Asp or Thr or Ser or Ile
  misc_feature (414)..(414): Absent or Phe or Arg or Thr or Glu or Gly or Asp
  misc_feature (415)..(415): Absent or Pro or Ala or Leu or Lys or Ser
  misc_feature (416)..(416): Absent or Pro or Gln or Ser
  misc_feature (417)..(417): Absent or Ala or Gly
  misc_feature (418)..(418): Absent or Pro or Gly
  misc_feature (419)..(419): Absent or Ile or Phe
  misc_feature (420)..(420): Absent or Pro or Asp
  misc_feature (421)..(421): Absent or Pro or Phe
  misc_feature (422)..(422): Absent or Asn or Ser or Cys
  misc_feature (423)..(423): Absent or Ser or Gly or Leu
  misc_feature (424)..(424): Absent or Arg or Ser or Cys or Met or Asp
  misc_feature (425)..(425): Absent or Leu or Thr or Ser or Ala
  misc_feature (426)..(426): Absent or Val or Met or Pro or Leu
  misc_feature (427)..(427): Absent or Met or Gly or Trp or Leu
  misc_feature (428)..(428): Absent or Glu or Val or Gln or Ala
  misc_feature (429)..(429): Absent or Asp or His or Phe or Gly
  misc_feature (430)..(430): Absent or Pro or Leu or Ile
  misc_feature (431)..(431): Absent or Ser or Met or Leu or Gly
  misc_feature (432)..(432): Absent or Pro or Gly or Ile or Tyr
  misc_feature (433)..(433): Absent or Arg or Val or Ala
  misc_feature (434)..(434): Absent or Ala or Val or Thr
  misc_feature (435)..(435): Absent or Arg or Pro or Ala
  misc_feature (436)..(436): Absent or Leu or Phe or Lys or Pro
  misc_feature (437)..(437): Absent or Gly or Trp or Ile
  misc_feature (438)..(438): Absent or Ser or Glu or Met
  misc_feature (439)..(439): Absent or Ala or Gly
  misc_feature (440)..(440): Absent or Gly or Ser or Asp or Leu
  misc_feature (441)..(441): Absent or Ser or Gln or Leu
  misc_feature (442)..(442): Absent or Phe or Trp
  misc_feature (443)..(443): Absent or Ile
  misc_feature (444)..(444): Absent or Leu
  misc_feature (445)..(445): Absent or Asp
  misc_feature (446)..(446): Absent or Asp
  misc_feature (447)..(447): Absent or Glu
  misc_feature (448)..(448): Absent or Val
  misc_feature (449)..(449): Absent or Val
  misc_feature (450)..(450): Absent or Lys
  misc_feature (451)..(451): Absent or Leu
  misc_feature (452)..(452): Absent or Ser
  misc_feature (453)..(453): Absent or Pro
  misc_feature (454)..(454): Absent or His
  misc_feature (455)..(455): Absent or Ala
  misc_feature (456)..(456): Absent or Arg
  misc_feature (457)..(457): Absent or Ala
  misc_feature (458)..(458): Absent or Ile
  misc_feature (459)..(459): Absent or Arg
  misc_feature (460)..(460): Absent or Asp
  misc_feature (461)..(461): Absent or Val
  misc_feature (462)..(462): Absent or Glu
  misc_feature (463)..(463): Absent or Asp
  misc_feature (464)..(464): Absent or Glu
  misc_feature (465)..(465): Absent or Glu
  misc_feature (466)..(466): Absent or Leu
  misc_feature (467)..(467): Absent or Arg
  misc_feature (468)..(468): Absent or Ser
  misc_feature (469)..(469): Absent or Phe
  misc_feature (470)..(470): Absent or Phe
  misc_feature (471)..(471): Absent or Phe
  misc_feature (472)..(472): Absent or Gly
  misc_feature (473)..(473): Absent or Met
  misc_feature (474)..(474): Absent or Ser
  misc_feature (475)..(475): Absent or Pro
  misc_feature (476)..(476): Absent or Trp
  misc_feature (477)..(477): Absent or Gln
  misc_feature (478)..(478): Absent or Phe
  misc_feature (479)..(479): Absent or Ile
  misc_feature (480)..(480): Absent or Leu
  misc_feature (481)..(481): Absent or Ile
  misc_feature (482)..(482): Absent or Val
  misc_feature (483)..(483): Absent or Ala
  misc_feature (484)..(484): Absent or Ala
  misc_feature (485)..(485): Absent or Ser
  misc_feature (486)..(486): Absent or Ser
  misc_feature (487)..(487): Absent or Ile
  misc_feature (488)..(488): Absent or Gly
  misc_feature (489)..(489): Absent or Glu
  misc_feature (490)..(490): Absent or Glu
  misc_feature (491)..(491): Absent or Leu
  misc_feature (492)..(492): Absent or Phe
  misc_feature (493)..(493): Absent or Tyr
  misc_feature (494)..(494): Absent or Arg
  misc_feature (495)..(495): Absent or Val
  misc_feature (496)..(496): Absent or Ala
  misc_feature (497)..(497): Absent or Val
  misc_feature (498)..(498): Absent or Gln
  misc_feature (499)..(499): Absent or Gly
  misc_feature (500)..(500): Absent or Ala
  misc_feature (501)..(501): Absent or Leu
  misc_feature (502)..(502): Absent or Ser
  misc_feature (503)..(503): Absent or Asp
  misc_feature (504)..(504): Absent or Ile
  misc_feature (505)..(505): Absent or Phe
  misc_feature (506)..(506): Absent or Leu
  misc_feature (507)..(507): Absent or Lys
  misc_feature (508)..(508): Absent or Gly
  misc_feature (509)..(509): Absent or Thr
  misc_feature (510)..(510): Absent or Gln
  misc_feature (511)..(511): Absent or Leu
  misc_feature (512)..(512): Absent or Met
  misc_feature (513)..(513): Absent or Thr
  misc_feature (514)..(514): Absent or Asp
  misc_feature (515)..(515): Absent or Ser
  misc_feature (516)..(516): Absent or Arg
  misc_feature (517)..(517): Absent or Gly
  misc_feature (518)..(518): Absent or Met
  misc_feature (519)..(519): Absent or Ala
  misc_feature (520)..(520): Absent or Ser
  misc_feature (521)..(521): Absent or Leu
  misc_feature (522)..(522): Absent or Thr
  misc_feature (523)..(523): Absent or Gly
  misc_feature (524)..(524): Absent or Val
  misc_feature (525)..(525): Absent or Phe
  misc_feature (526)..(526): Absent or Pro
  misc_feature (527)..(527): Absent or Pro
  misc_feature (528)..(528): Absent or Phe
  misc_feature (529)..(529): Absent or Val
  misc_feature (530)..(530): Absent or Pro
  misc_feature (531)..(531): Absent or Phe
  misc_feature (532)..(532): Absent or Ala
  misc_feature (533)..(533): Absent or Glu
  misc_feature (534)..(534): Absent or Val
  misc_feature (535)..(535): Absent or Phe
  misc_feature (536)..(536): Absent or Ala
  misc_feature (537)..(537): Absent or Ala
  misc_feature (538)..(538): Absent or Val
  misc_feature (539)..(539): Absent or Ile
  misc_feature (540)..(540): Absent or Thr
  misc_feature (541)..(541): Absent or Ala
  misc_feature (542)..(542): Absent or Thr
  misc_feature (543)..(543): Absent or Leu
  misc_feature (544)..(544): Absent or Thr
  misc_feature (545)..(545): Absent or Gly
  misc_feature (546)..(546): Absent or Ser
  misc_feature (547)..(547): Absent or Leu
  misc_feature (548)..(548): Absent or Tyr
  misc_feature (549)..(549): Absent or Phe
  misc_feature (550)..(550): Absent or Leu
  misc_feature (551)..(551): Absent or Ala
  misc_feature (552)..(552): Absent or Ala
  misc_feature (553)..(553): Absent or Ser
  misc_feature (554)..(554): Absent or Pro
  misc_feature (555)..(555): Absent or Lys
  misc_feature (556)..(556): Absent or Asp
  misc_feature (557)..(557): Absent or Pro
  misc_feature (558)..(558): Absent or Thr
  misc_feature (559)..(559): Absent or Tyr
  misc_feature (560)..(560): Absent or Ile
  misc_feature (561)..(561): Absent or Val
  misc_feature (562)..(562): Absent or Ala
  misc_feature (563)..(563): Absent or Pro
  misc_feature (564)..(564): Absent or Val
  misc_feature (565)..(565): Absent or Leu
  misc_feature (566)..(566): Absent or Arg
  misc_feature (567)..(567): Absent or Ser
  misc_feature (568)..(568): Absent or Arg
  misc_feature (569)..(569): Absent or Arg
  misc_feature (570)..(570): Absent or Asp
  misc_feature (571)..(571): Absent or Asp
  misc_feature (572)..(572): Absent or Phe
  misc_feature (573)..(573): Absent or Lys
  misc_feature (574)..(574): Absent or Lys
  misc_feature (575)..(575): Absent or Leu
  misc_feature (576)..(576): Absent or Leu
  misc_feature (577)..(577): Absent or Ser
  misc_feature (578)..(578): Absent or Ala
  misc_feature (579)..(579): Absent or Trp
  misc_feature (580)..(580): Absent or Tyr
  misc_feature (581)..(581): Absent or Glu
  misc_feature (582)..(582): Absent or Lys
  misc_feature (583)..(583): Absent or Arg
  misc_feature (584)..(584): Absent or Gln
  misc_feature (585)..(585): Absent or Met
  misc_feature (586)..(586): Absent or Lys
  misc_feature (587)..(587): Absent or Lys
  misc_feature (588)..(588): Absent or Ile
  misc_feature (589)..(589): Absent or Tyr
  misc_feature (590)..(590): Absent or Ser
  misc_feature (591)..(591): Absent or Pro
  misc_feature (592)..(592): Absent or Leu
  misc_feature (593)..(593): Absent or Leu
  misc_feature (594)..(594): Absent or Glu
  misc_feature (595)..(595): Absent or Gly
  misc_feature (596)..(596): Absent or Leu
  misc_feature (597)..(597): Absent or Leu
  misc_feature (598)..(598): Absent or Ala
  misc_feature (599)..(599): Absent or Leu
  misc_feature (600)..(600): Absent or Tyr
  misc_feature (601)..(601): Absent or Leu
  misc_feature (602)..(602): Absent or Gly
  misc_feature (603)..(603): Absent or Ile
  misc_feature (604)..(604): Absent or Glu
  misc_feature (605)..(605): Absent or Trp
  misc_feature (606)..(606): Absent or Val
  misc_feature (607)..(607): Absent or Gln
  misc_feature (608)..(608): Absent or Thr
  misc_feature (609)..(609): Absent or Asp
  misc_feature (610)..(610): Absent or Asn
  misc_feature (611)..(611): Absent or Ile
  misc_feature (612)..(612): Absent or Leu
  misc_feature (613)..(613): Absent or Ala
  misc_feature (614)..(614): Absent or Pro
  misc_feature (615)..(615): Absent or Met
  misc_feature (616)..(616): Absent or Met
  misc_feature (617)..(617): Absent or Thr
  misc_feature (618)..(618): Absent or His
  misc_feature (619)..(619): Absent or Gly
  misc_feature (620)..(620): Absent or Ile
  misc_feature (621)..(621): Absent or Tyr
  misc_feature (622)..(622): Absent or Ser
  misc_feature (623)..(623): Absent or Ala
  misc_feature (624)..(624): Absent or Val
  misc_feature (625)..(625): Absent or Ile
  misc_feature (626)..(626): Absent or Leu
  misc_feature (627)..(627): Absent or Gly
  misc_feature (628)..(628): Absent or His
  misc_feature (629)..(629): Absent or Gly
  misc_feature (630)..(630): Absent or Leu
  misc_feature (631)..(631): Absent or Trp
  misc_feature (632)..(632): Absent or Lys
  misc_feature (633)..(633): Absent or Ile
  misc_feature (634)..(634): Absent or His
  misc_feature (635)..(635): Absent or Asp
  misc_feature (636)..(636): Absent or His
  misc_feature (637)..(637): Absent or Arg
  misc_feature (638)..(638): Absent or Arg
  misc_feature (639)..(639): Absent or Arg
  misc_feature (640)..(640): Absent or Leu
  misc_feature (641)..(641): Absent or Arg
  misc_feature (642)..(642): Absent or Arg
  misc_feature (643)..(643): Absent or Arg
  misc_feature (644)..(644): Absent or Ile
  misc_feature (645)..(645): Absent or Glu
  misc_feature (646)..(646): Absent or His
  misc_feature (647)..(647): Absent or Ile
  misc_feature (648)..(648): Absent or Arg
  misc_feature (649)..(649): Absent or Ser
  misc_feature (650)..(650): Absent or Glu
  misc_feature (651)..(651): Absent or Ala
  misc_feature (652)..(652): Absent or Thr
  misc_feature (653)..(653): Absent or Asp
  misc_feature (654)..(654): Absent or Lys
  misc_feature (655)..(655): Absent or Leu
  misc_feature (656)..(656): Absent or Ile
  unsure (1)..(656): unsure at all Xaa locations
XXXXXXXXXXXXXXXXXXXXXXXXXXXXXXXXXXXXXXXXXXXXXXXXXXXXXXXXXXXXXXXXXXXXXXXXXXXXXXXXXXXXXXXXXXXXXXXXXXXXXXXXXXXXXXXXXXXXXXXXXXXXXXXXXXXXXXXXXXXXXXXXXXXXXXXXXXXXXXXXXXXXXXXXXXXXXXXXXXXXXXXXXXXXXXXXXXXXXXXXXXXXXXXXXXXXXXXXXXXXXXXXXXXXXXXXXXXXXXXXRXXXXXXXXXXXXXXXXXXXXXXXXXXXXXXXXXXXXPXXXXXXAXXXAXXXXXXXXXXXXXXXXXXXXXXXXXXXXXXXXXXXXXXXXXXXXXXXXXXXXXXXXXXXXXXXXXXXXXXXXLXXXXXXXXXXXXXLXXXXXXXXXXXXRXXXXXXXXXXXXXXXXXXXXXXXXXXXXXXXXXXXXXXXXXXXXXXXXXXXXXXXXXXXXXXXXXXXXXXXXXXXXXXXXXXXXXXXXXXXXXXXXXXXXXXXXXXXXXXXXXXXXXXXXXXXXXXXXXXXXXXXXXXXXXXXXXXXXXXXXXXXXXXXXXXXXXXXXXXXXXXXXXXXXXXXXXXXXXXXXXXXXXXXXXXXXXXXXXXXXXXXXXXXXXXXXXXXXXXXXXXXXXXXXXXXXXXXXXXXXXXXXXXXXXXXXXXX

SEQ ID NO: 36474 - protein, 563 aa, Artificial sequence
  consensus sequence of seq id no: 579  and its homologs
  misc_feature (1)..(1): Absent or Met
  misc_feature (2)..(2): Absent or Val
  misc_feature (3)..(3): Absent or Asp
  misc_feature (4)..(4): Absent or Trp
  misc_feature (5)..(5): Absent or Met
  misc_feature (6)..(6): Absent or Asp
  misc_feature (7)..(7): Absent or Met
  misc_feature (8)..(8): Absent or Val
  misc_feature (9)..(9): Absent or Val
  misc_feature (10)..(10): Absent or Val or Met
  misc_feature (11)..(11): Absent or Asp or Ala
  misc_feature (12)..(12): Absent or Met or Gln
  misc_feature (13)..(13): Absent or Val or Thr
  misc_feature (14)..(14): Absent or Glu or Gly
  misc_feature (15)..(15): Absent or Val or Trp
  misc_feature (16)..(16): Absent or Glu
  misc_feature (17)..(17): Absent or Glu or Asn
  misc_feature (18)..(18): Absent or Val or Arg
  misc_feature (19)..(19): Absent or Glu or Phe
  misc_feature (20)..(20): Absent or Glu or Cys
  misc_feature (21)..(21): Absent or Glu or Arg
  misc_feature (22)..(22): Absent or Tyr or Glu
  misc_feature (23)..(23): Absent or Met or His
  misc_feature (24)..(24): Absent or Ser or Asp
  misc_feature (25)..(25): Absent or Thr or Asp
  misc_feature (26)..(26): Absent or Val or Ile or Gln
  misc_feature (27)..(27): Absent or Phe or Tyr or Gln
  misc_feature (28)..(28): Absent or Met or Val
  misc_feature (29)..(29): Absent or Thr or Ser or Asn
  misc_feature (30)..(30): Absent or Gln or Cys
  misc_feature (31)..(31): Absent or Leu
  misc_feature (32)..(32): Absent or Pro or Glu
  misc_feature (33)..(33): Absent or Arg or Ala or Leu
  misc_feature (34)..(34): Absent or Thr or Ala
  misc_feature (35)..(35): Absent or Leu
  misc_feature (36)..(36): Absent or Arg or Pro
  misc_feature (37)..(37): Absent or Leu or Pro
  misc_feature (38)..(38): Absent or Met or Ala
  misc_feature (39)..(39): Absent or Glu or Met or Thr or Ile
  misc_feature (40)..(40): Absent or Gly or Glu or Pro
  misc_feature (41)..(41): Absent or Glu or Asp or Thr or Ala or Asn
  misc_feature (42)..(42): Absent or Gln or Tyr
  misc_feature (43)..(43): Absent or Asp or Pro or Leu
  misc_feature (44)..(44): Absent or Gln or Phe or Asn or His or Arg
  misc_feature (45)..(45): Absent or Gly or Pro or Ser or Tyr
  misc_feature (46)..(46): Absent or Leu or Thr or Ala or Ser or Pro
  misc_feature (47)..(47): Absent or Phe or Tyr or Gly or Ser or Val or Pro
  misc_feature (48)..(48): Absent or Pro or Val or Ser
  misc_feature (49)..(49): Absent or Ala or Leu or Ser or Pro
  misc_feature (50)..(50): Absent or Ser or Asn or Phe or Pro
  misc_feature (51)..(51): Absent or Thr or Phe or Pro or Met
  misc_feature (52)..(52): Absent or Phe or Glu or Thr or Pro
  misc_feature (53)..(53): Absent or His or Gly or Val or Ile or Leu
  misc_feature (54)..(54): Absent or Val or Arg or Ser or Asp or Gln
  misc_feature (55)..(55): Absent or Ala or Glu or Leu
  misc_feature (56)..(56): Absent or Lys or Gly or Arg or Asn
  misc_feature (57)..(57): Absent or Asp or Tyr or Glu
  misc_feature (58)..(58): Absent or Pro or Glu or Asp
  misc_feature (59)..(59): Absent or Pro or Ala or Gln or His
  misc_feature (60)..(60): Absent or Ile or Thr or Asn or His
  misc_feature (61)..(61): Absent or Leu or Ser or His
  misc_feature (62)..(62): Absent or Phe or Glu or Gln or His
  misc_feature (63)..(63): Absent or Pro or Val or Gln
  misc_feature (64)..(64): Absent or Phe or Lys or Leu
  misc_feature (65)..(65): Thr or Absent or Met or Ile or Val or Leu
  misc_feature (66)..(66): Ile or Absent or Leu or Phe
  misc_feature (67)..(67): Arg or Absent or Thr or Asp or Met or Phe or Cys or Ser
  misc_feature (68)..(68): Lys or Absent or Ser or Gly or Leu
  misc_feature (69)..(69): Lys or Val or Met or Pro or Ala or Ser or Absent
  misc_feature (70)..(70): Asp or Gly or Val or Ile or Absent or Pro or Thr or Lys
  misc_feature (71)..(71): His or Pro or Ser or Glu or Leu or Absent or Thr
  misc_feature (72)..(72): His or Arg or Asn or Val or Asp or Absent or Gln or Thr
  misc_feature (73)..(73): Asp or Val or Phe or Absent or His or Ala or Glu or Gln or Pro
  misc_feature (74)..(74): Asp or Arg or His or Gln or Absent or Gly or Ala or Ser
  misc_feature (75)..(75): Gln or Phe or Tyr or Leu or Absent or Cys or Ser or Thr or Ala
  misc_feature (76)..(76): Pro or Absent or Ser or Gln
  misc_feature (77)..(77): Ile or Absent or Gly or Pro or Ser or Leu
  misc_feature (78)..(78): Ser or Absent or Asp or Gln or Arg or Asn
  misc_feature (79)..(79): Ser or Leu or Absent or Cys or Gly
  misc_feature (80)..(80): Ser or Ile or Asn or Absent or Pro
  misc_feature (81)..(81): Lys or Tyr or Glu or Ala or Ser or Absent or Thr or Ile or Leu
  misc_feature (82)..(82): Pro or Glu or Asp or Gly or Ala or Ser or Absent or Asn or Thr
  misc_feature (83)..(83): Asp or His or Gln or Ser or Phe or Absent or Tyr or Cys
  misc_feature (84)..(84): Lys or Pro or Asn or Gln or Leu or Absent or Phe or Ser
  misc_feature (85)..(85): Leu or His or Gly or Ser or Absent or Asn or Ile
  misc_feature (86)..(86): Asn or His or Leu or Absent or Thr or Phe
  misc_feature (87)..(87): Ser or Asp or Glu or Gly or Arg or Absent or Ile or Phe
  misc_feature (88)..(88): X or His or Gln or Absent or Arg or Asn or Ala or Ser
  misc_feature (89)..(89): Ala or Absent or Pro or Gln or Gly or His
  misc_feature (90)..(90): Asp or Absent or Phe or His or Gln or Leu or Pro
  misc_feature (91)..(91): Lys or Absent or Phe or Val or His or Gln or Thr
  misc_feature (92)..(92): X or Absent or Tyr or Leu or Asp or Gln or Glu or Lys
  misc_feature (93)..(93): Leu or Absent or Pro or Ser or Gly or His or Arg or Glu
  misc_feature (94)..(94): Met or Absent or Leu or Glu or Lys or Val or Gln
  misc_feature (95)..(95): Ser or Absent or Gly or Asp or Thr
  misc_feature (96)..(96): Pro or Absent or Ser or Thr or Asn or Asp or Lys or Gly
  misc_feature (97)..(97): Lys or Absent or Ser or Gln or Asn or Pro or Cys
  misc_feature (98)..(98): Met or Absent or Ser or Gln or Ile or Gly or Tyr or Cys or His
  misc_feature (99)..(99): Arg or Absent or Ser or Phe or Tyr or Glu or Cys
  misc_feature (100)..(100): Leu or Absent or Thr or Asn or Val or Ser or His or Arg
  misc_feature (101)..(101): Ile or Absent or Leu or His or Asp or Ala or Arg or Lys or Trp
  misc_feature (102)..(102): Lys or Absent or His or Arg or Asp or Gln or Glu or Leu
  misc_feature (103)..(103): Lys or Absent or His or Thr or Met or Leu or Ser
  misc_feature (104)..(104): Thr or Absent or His or Met or Val or Asp or Gln or Lys
  misc_feature (105)..(105): Ile or Absent or His or Met or Glu or Asn or Pro or Ala
  misc_feature (106)..(106): Thr or Absent or His or Ser or Gly or Leu or Gln
  misc_feature (107)..(107): X or Absent or His or Gly or Glu or Gln or Pro
  misc_feature (108)..(108): Asn or His or Ser or Gly or Absent or Val or Gln
  misc_feature (109)..(109): Asn or His or Glu or Asp or Ile or Absent or Gln
  misc_feature (110)..(110): Lys or Glu or Gln or Val or Arg or Absent or Met
  misc_feature (111)..(111): X or Val or Phe or Leu or Absent or Tyr or Glu or Ala
  misc_feature (112)..(112): Arg or Pro or Leu or Asn or Absent or Asp or Ala or His
  misc_feature (113)..(113): Ile or Cys or Ser or Arg or Thr or Absent or Asn or Gln or Asp
  misc_feature (114)..(114): Asp or Asn or Arg or Absent or Glu or Ser or Ile or Lys
  misc_feature (115)..(115): His or Absent or Ser or Pro or Ile or Tyr or Phe
  misc_feature (116)..(116): Thr or Absent or Ser or Glu or Gly or Ala or Val
  misc_feature (117)..(117): X or Absent or Cys or Ser or Pro or Lys or Gly or Phe
  misc_feature (118)..(118): Ser or Phe or Ala or Glu or His or Absent or Arg
  misc_feature (119)..(119): Asn or Leu or Ser or Gly or Arg or Ala or Thr or Absent
  misc_feature (120)..(120): Asp or Ser or Gln or Pro or Ala or Val or Arg or Glu or Absent or Gly
  misc_feature (121)..(121): Asn or Cys or Ser or Thr or Gly or Val or Absent
  misc_feature (122)..(122): Asn or Ile or Met or Phe or Trp or Absent or Tyr
  misc_feature (123)..(123): His or Ser or Gln or Asp or Val or Glu or Absent
  misc_feature (124)..(124): Lys or Ser or His or Asp or Pro or Absent
  misc_feature (125)..(125): X or Leu or Ile or Pro or Glu or Arg or Absent
  misc_feature (126)..(126): Asp or Ser or Gly or Ala or Leu or Val or Ile or Absent or Thr
  misc_feature (127)..(127): His or Ser or Gly or Asp or Asn or Ile or Absent or Leu
  misc_feature (128)..(128): Tyr or Asp or Gln or Ser or Lys or Glu or Absent
  misc_feature (129)..(129): X or Leu or Met or Tyr or Ala or His or Absent or Lys
  misc_feature (130)..(130): Leu or Pro or Ile or Asp or Cys or Asn or Absent or Ser
  misc_feature (131)..(131): Asp or Phe or Gln or Tyr or Glu or Absent
  misc_feature (132)..(132): Lys or Leu or Pro or Arg or Asn or Absent or Ser
  misc_feature (133)..(133): Thr or Ile or Ser or Lys or Arg or Glu or Absent or Asp
  misc_feature (134)..(134): Thr or Asn or Ala or Ser or Tyr or Absent
  misc_feature (135)..(135): Absent or Asn
  misc_feature (136)..(136): Absent or Tyr
  misc_feature (137)..(137): Absent or Ala
  misc_feature (138)..(138): Absent or Ser
  misc_feature (139)..(139): Absent or Leu
  misc_feature (140)..(140): Absent or Ala
  misc_feature (141)..(141): Absent or Ser
  misc_feature (142)..(142): Absent or Tyr or Glu
  misc_feature (143)..(143): Absent or Asp or Leu or Phe or Gly
  misc_feature (144)..(144): Absent or Pro or Glu or His or Gln or Leu
  misc_feature (145)..(145): Absent or Tyr or Met or Ser or Asn or Glu or Lys
  misc_feature (146)..(146): Absent or Asp or Ile or Glu or Leu
  misc_feature (147)..(147): Absent or Ile or Asp or Glu or Ser or Arg or Thr
  misc_feature (148)..(148): Absent or Val or Glu or Thr or Ser or Ile
  misc_feature (149)..(149): Absent or Glu or Ser or Trp or Cys
  misc_feature (150)..(150): Absent or Asn or Ser or Lys
  misc_feature (151)..(151): Absent or Gln or Asn or Pro or Met or Lys or Thr
  misc_feature (152)..(152): Absent or Arg or Lys or His or Asn or Glu
  misc_feature (153)..(153): Absent or Thr or Gln or Glu or Asp
  misc_feature (154)..(154): Absent or Glu or His or Ala or Gly or Lys or Arg
  misc_feature (155)..(155): Absent or Gly or Ala or Arg or Ser or Cys or Asn
  misc_feature (156)..(156): Absent or Leu or Asn or Lys or Glu or Thr
  misc_feature (157)..(157): Absent or Ser or Gly or Asp or Glu or Asn
  misc_feature (158)..(158): Absent or Gly or Ala or Ser or Ile or Phe or His
  misc_feature (159)..(159): Absent or Gly or Ala or Glu
  misc_feature (160)..(160): Absent or Gly or Leu or Asp
  misc_feature (161)..(161): Absent or Trp or Ile or Gln
  misc_feature (162)..(162): Absent or Thr or Ser or Ile or Arg or Val
  misc_feature (163)..(163): Phe or Ser or Val or Thr or Asn or His or Gly or Asp or Glu or Absent
  misc_feature (164)..(164): Lys or Gln or Ser or Arg or Gly or Glu or Asn or Asp or Absent
  misc_feature (165)..(165): Glu or Ser or Lys or Asn or Absent or Gly
  misc_feature (166)..(166): Asp or Ser or Trp or Gly or Absent
  misc_feature (167)..(167): His or Gln or Ser or Met or Ala or Asn or Val or Thr or Absent
  misc_feature (168)..(168): Asp or His or Ser or Lys or Absent
  misc_feature (169)..(169): Glu or Val or Ser or Thr or Phe or Trp or Absent
  misc_feature (170)..(170): Glu or Ala or Pro or Gln or Met or Absent
  misc_feature (171)..(171): Leu or Tyr or Pro or Ser or Absent
  misc_feature (172)..(172): Lys or Asn or Ala or Met or Ser or Leu or Absent
  misc_feature (173)..(173): Lys or Asn or Ser or Asp or Absent
  misc_feature (174)..(174): Val or Thr or Met or Ala or Absent
  misc_feature (175)..(175): Ser or Tyr or Lys or Arg or Glu or Absent
  misc_feature (176)..(176): Thr or His or Ile or Leu or Met or Val or Absent
  misc_feature (177)..(177): Arg or Ala or X or Met or Ile or Gly or Absent
  misc_feature (178)..(178): Thr or Asp or Arg or Glu or Lys or Gln or Absent
  misc_feature (179)..(179): Thr or His or Lys or Pro or Arg or Absent
  misc_feature (180)..(180): Thr or Leu or Val or Ala or Gly or Ser or Met or Absent
  misc_feature (181)..(181): Ala or His or Thr or Met or Leu
  misc_feature (182)..(182): Val or Leu or Ser or Ala or Arg or Asn or Thr or Ile
  misc_feature (183)..(183): Thr or Ser or Glu or Leu or Pro
  misc_feature (184)..(184): Thr or Gln or Tyr or Asp or Ser or Asn
  misc_feature (185)..(185): Glu or Pro or Ile or Cys or Gln
  misc_feature (186)..(186): Lys or Leu or Glu or Val or Ser or Thr
  misc_feature (187)..(187): Arg or Lys or Gly or Glu or Pro or Val or Asp
  misc_feature (188)..(188): Cys or Absent or Ala or Gly or Asn or Thr or Phe
  misc_feature (189)..(189): Asn or Absent or Lys or Ala or Tyr or Thr or Asp or Gln
  misc_feature (190)..(190): Thr or Absent or Met or Ala or Val or Leu or Asp or His or Lys
  misc_feature (191)..(191): Ile or Absent or Phe or Arg or Ser or Lys or Met or Gln or Glu or Asn or Pro
  misc_feature (192)..(192): Asn or Absent or Val or Lys or Gly or Pro
  misc_feature (193)..(193): Glu or Absent or Ala or Pro or Gly or Met or Ser
  misc_feature (194)..(194): Thr or Absent or Asn or Gly
  misc_feature (195)..(195): X or Absent or Gly or Phe
  misc_feature (196)..(196): Absent or Gly or Pro
  misc_feature (197)..(197): Absent or Ser or Val
  misc_feature (198)..(198): Absent or Ser or Ala
  misc_feature (199)..(199): Absent or Ala or Gln
  misc_feature (200)..(200): Absent or Cys or Lys
  misc_feature (201)..(201): Absent or Asp or Glu
  misc_feature (202)..(202): Absent or His or Ser
  misc_feature (203)..(203): Absent or Met or Ser
  misc_feature (204)..(204): Absent or Val or Trp
  misc_feature (205)..(205): Absent or Pro or Ile
  misc_feature (206)..(206): Absent or Lys or Arg
  misc_feature (207)..(207): Absent or Lys or Ser
  misc_feature (208)..(208): Absent or Glu or Ala
  misc_feature (209)..(209): Absent or Thr or Ser
  misc_feature (210)..(210): Absent or Arg
  misc_feature (211)..(211): Absent or Leu
  misc_feature (212)..(212): Absent or Lys
  misc_feature (213)..(213): Absent or Leu
  misc_feature (214)..(214): Absent or Thr
  misc_feature (215)..(215): Absent or Ile
  misc_feature (216)..(216): Absent or Arg
  misc_feature (217)..(217): Absent or Lys
  misc_feature (218)..(218): Absent or Lys
  misc_feature (219)..(219): Absent or Asp
  misc_feature (220)..(220): Absent or His
  misc_feature (221)..(221): Absent or Glu
  misc_feature (222)..(222): Absent or Asp
  misc_feature (223)..(223): Absent or Gln
  misc_feature (224)..(224): Absent or Pro
  misc_feature (225)..(225): Absent or His
  misc_feature (226)..(226): Absent or Pro
  misc_feature (227)..(227): Absent or Leu
  misc_feature (228)..(228): Absent or His
  misc_feature (229)..(229): Absent or Gln
  misc_feature (230)..(230): Absent or Asn
  misc_feature (231)..(231): Absent or Pro
  misc_feature (232)..(232): Absent or Thr
  misc_feature (233)..(233): Absent or Lys
  misc_feature (234)..(234): Absent or Pro
  misc_feature (235)..(235): Absent or Asp
  misc_feature (236)..(236): Absent or Ser
  misc_feature (237)..(237): Absent or Asp
  misc_feature (238)..(238): Absent or Ser
  misc_feature (239)..(239): Absent or Asp
  misc_feature (240)..(240): Absent or Lys
  misc_feature (241)..(241): Absent or Trp
  misc_feature (242)..(242): Absent or Leu
  misc_feature (243)..(243): Absent or Met
  misc_feature (244)..(244): Absent or Ser
  misc_feature (245)..(245): Absent or Pro
  misc_feature (246)..(246): Absent or Lys
  misc_feature (247)..(247): Absent or Met
  misc_feature (248)..(248): Absent or Arg
  misc_feature (249)..(249): Absent or Leu
  misc_feature (250)..(250): Absent or Ile
  misc_feature (251)..(251): Absent or Lys
  misc_feature (252)..(252): Absent or Lys
  misc_feature (253)..(253): Absent or Thr
  misc_feature (254)..(254): Absent or Ile
  misc_feature (255)..(255): Absent or Thr
  misc_feature (256)..(256): Absent or Asn
  misc_feature (257)..(257): Absent or Asn
  misc_feature (258)..(258): Absent or Lys
  misc_feature (259)..(259): Absent or Gln
  misc_feature (260)..(260): Absent or Leu
  misc_feature (261)..(261): Absent or Ile
  misc_feature (262)..(262): Absent or Asp
  misc_feature (263)..(263): Absent or Gln
  misc_feature (264)..(264): Absent or Thr
  misc_feature (265)..(265): Absent or Asn
  misc_feature (266)..(266): Absent or Asn
  misc_feature (267)..(267): Absent or Asn
  misc_feature (268)..(268): Absent or Asn
  misc_feature (269)..(269): Absent or His
  misc_feature (270)..(270): Absent or Lys
  misc_feature (271)..(271): Absent or Glu
  misc_feature (272)..(272): Absent or Ser
  misc_feature (273)..(273): Absent or Asp
  misc_feature (274)..(274): Absent or His
  misc_feature (275)..(275): Absent or Tyr
  misc_feature (276)..(276): Absent or Pro
  misc_feature (277)..(277): Absent or Leu
  misc_feature (278)..(278): Absent or Asn
  misc_feature (279)..(279): Absent or His
  misc_feature (280)..(280): Absent or Lys
  misc_feature (281)..(281): Absent or Thr
  misc_feature (282)..(282): Absent or Asn
  misc_feature (283)..(283): Absent or Phe
  misc_feature (284)..(284): Absent or Asp
  misc_feature (285)..(285): Absent or Glu
  misc_feature (286)..(286): Absent or Asp
  misc_feature (287)..(287): Absent or His
  misc_feature (288)..(288): Absent or His
  misc_feature (289)..(289): Absent or Glu
  misc_feature (290)..(290): Absent or Asp
  misc_feature (291)..(291): Absent or Leu
  misc_feature (292)..(292): Absent or Asn
  misc_feature (293)..(293): Absent or Phe
  misc_feature (294)..(294): Absent or Lys
  misc_feature (295)..(295): Absent or Asn
  misc_feature (296)..(296): Absent or Val
  misc_feature (297)..(297): Absent or Leu
  misc_feature (298)..(298): Absent or Thr
  misc_feature (299)..(299): Absent or Arg
  misc_feature (300)..(300): Absent or Lys
  misc_feature (301)..(301): Absent or Thr
  misc_feature (302)..(302): Absent or Thr
  misc_feature (303)..(303): Absent or Ala
  misc_feature (304)..(304): Absent or Ala
  misc_feature (305)..(305): Absent or Thr
  misc_feature (306)..(306): Absent or Thr
  misc_feature (307)..(307): Absent or Glu
  misc_feature (308)..(308): Absent or Asn
  misc_feature (309)..(309): Absent or Arg
  misc_feature (310)..(310): Absent or Tyr
  misc_feature (311)..(311): Absent or Asn
  misc_feature (312)..(312): Absent or Thr
  misc_feature (313)..(313): Absent or Ile
  misc_feature (314)..(314): Absent or Asn
  misc_feature (315)..(315): Absent or Glu
  misc_feature (316)..(316): Absent or Asn
  misc_feature (317)..(317): Absent or Gly
  misc_feature (318)..(318): Tyr or Absent or Lys or Ala or His or Ile or Asp
  misc_feature (319)..(319): Gly or Absent or Ser or Arg or Ile or Met or Thr or Asn
  misc_feature (320)..(320): Asn or Absent or Arg or Lys or Ser
  misc_feature (321)..(321): X or Absent or Asn or Arg or Lys or Ser or Phe or Thr
  misc_feature (322)..(322): Asn or Absent or Ala or Thr or Ser or Met or Lys
  misc_feature (323)..(323): Gly or Absent or Gln or Leu or Pro or His
  misc_feature (324)..(324): X or Absent or Val or Ala or Phe or Arg or Lys or Ile or Asn
  misc_feature (325)..(325): X or Absent or Ile or His or Asn or Phe or Leu or Lys
  misc_feature (326)..(326): Arg or Absent or Gln or Asn or His or Glu or Asp or Gly
  misc_feature (327)..(327): X or Absent or Val or Asp or Glu or Asn
  misc_feature (328)..(328): X or Absent or Cys or Glu or His or Gln or Lys
  misc_feature (329)..(329): X or Absent or Ser or Asn or Gln or Glu or Lys
  misc_feature (330)..(330): X or Absent or Asp or Gln or Leu or Gly or Tyr or Lys or Asn
  misc_feature (331)..(331): Cys or Absent or Leu or Gln or Ser or Pro
  misc_feature (332)..(332): Asn or Absent or Leu or Gln or Glu or Arg or Pro
  misc_feature (333)..(333): Thr or Absent or Trp or Ser or Leu
  misc_feature (334)..(334): Thr or Absent or Met or Pro or Leu or Ser
  misc_feature (335)..(335): Lys or Absent or Pro
  misc_feature (336)..(336): Thr or Absent or Leu or Ser
  misc_feature (337)..(337): Pro or Absent or Gly or Gln or Glu
  misc_feature (338)..(338): Leu or Absent or Thr or Arg or Asp
  misc_feature (339)..(339): Trp or Absent or Ser or Arg or Asp
  misc_feature (340)..(340): Arg or Absent or Phe or Tyr or Asp or Asn
  misc_feature (341)..(341): Ser or Absent or Asn
  misc_feature (342)..(342): Gly or Absent or Ser or Gln or Asn
  misc_feature (343)..(343): Pro or Absent or Ser or Arg or Glu or Lys or Asn or Ile
  misc_feature (344)..(344): Arg or Absent or Thr or Tyr
  misc_feature (345)..(345): Gly or Absent or Gln or Leu or Lys or Ser or Ile or Asn
  misc_feature (346)..(346): Pro or Absent or Gln or Asp or Asn or Ser
  misc_feature (347)..(347): Lys or Absent or Gln or Ser or Arg or Leu or Tyr
  misc_feature (348)..(348): Ser or Absent or Ala or Thr or Asn
  misc_feature (349)..(349): Leu or Absent or Met or Thr or Asn or Ser or Asp or Ile
  misc_feature (350)..(350): Cys or Absent or Gly or Glu or Asn or His
  misc_feature (351)..(351): Asn or Absent or Val or Thr or Gly or Ser
  misc_feature (352)..(352): Absent or Pro
  misc_feature (353)..(353): Absent or Leu
  misc_feature (354)..(354): Absent or Asn
  misc_feature (355)..(355): Absent or His
  misc_feature (356)..(356): Absent or Gly
  misc_feature (357)..(357): Absent or Val
  misc_feature (358)..(358): Absent or Gly
  misc_feature (359)..(359): Absent or Gly
  misc_feature (360)..(360): Absent or Ser
  misc_feature (361)..(361): Absent or Arg
  misc_feature (362)..(362): Absent or Asn or Ser
  misc_feature (363)..(363): Absent or Asn or Ser or Ile
  misc_feature (364)..(364): Absent or Val or Thr or Asn
  misc_feature (365)..(365): Ala or Absent or Val or Pro or Ile
  misc_feature (366)..(366): Cys or Absent or Arg
  misc_feature (367)..(367): Gly or Absent or Val
  misc_feature (368)..(368): Ile or Absent or Cys
  misc_feature (369)..(369): Arg or Absent or Ser or Val or Ala
  misc_feature (370)..(370): Gln or Absent or Asp
  misc_feature (371)..(371): Arg or Absent or Cys
  misc_feature (372)..(372): Lys or Absent or Asn or His
  misc_feature (373)..(373): Ala or Absent or Thr
  misc_feature (374)..(374): Arg or Absent or Thr or Ser
  misc_feature (375)..(375): Arg or Absent or Lys or Thr or Ser
  misc_feature (376)..(376): Ala or Thr
  misc_feature (377)..(377): Ala or Asn or Lys or Pro
  misc_feature (378)..(378): Met or Leu
  misc_feature (379)..(379): Ala or Phe or Trp
  misc_feature (380)..(380): Ala or Asn or Arg
  misc_feature (381)..(381): Ala or Gly or Ser or Thr
  misc_feature (383)..(383): Ala or Ser or Pro
  misc_feature (384)..(384): Ala or Ser or Arg or Cys or Gln or Lys
  misc_feature (386)..(386): Asp or Ser or Pro
  misc_feature (387)..(387): Asp or Tyr or Gln or Lys
  misc_feature (388)..(388): Gln or Asp or Glu or Ser or Thr
  misc_feature (389)..(389): Absent or Val or Leu
  misc_feature (390)..(390): Glu or His or Ala or Cys
  misc_feature (391)..(391): Val or Thr or Met or Asn
  misc_feature (393)..(393): Ala or Pro or Cys
  misc_feature (394)..(394): Arg or Lys or Gly
  misc_feature (395)..(395): Leu or X or Absent or Val or Ile
  misc_feature (396)..(396): Gln or Lys or Arg
  misc_feature (399)..(399): Pro or Arg or Lys
  misc_feature (400)..(400): Val or Leu or Ala
  misc_feature (401)..(401): Lys or Arg
  misc_feature (402)..(402): Lys or Leu or Arg
  misc_feature (403)..(403): Lys or Thr or Asn or Ala
  misc_feature (404)..(404): X or Leu or Ile or Met or Absent
  misc_feature (405)..(405): Gln or Arg or Val or Met or Ser or Ala
  misc_feature (406)..(406): Asn or Lys or Ala or Glu or Val
  misc_feature (407)..(407): Lys or X or Ala or Phe
  misc_feature (408)..(408): Arg or Asp or Lys or Ala or Gly or Gln
  misc_feature (409)..(409): Lys or Tyr or His or Ala or Asn or Thr
  misc_feature (410)..(410): Arg or His or Ala or Asn or Ser or Gly or Absent or Thr
  misc_feature (411)..(411): Absent or Ala or Gly
  misc_feature (412)..(412): Absent or Ala or Gly or Ser
  misc_feature (413)..(413): Phe or Asp or Glu or Ser or Ala or Absent or Gly
  misc_feature (414)..(414): Asn or Asp or Ser or Ala or Absent
  misc_feature (415)..(415): Gly or Arg or Gln or Asn or Absent or Asp
  misc_feature (416)..(416): Gly or Thr or Absent or His or Met
  misc_feature (417)..(417): Asp or X or Glu or Gly or Val or Ile or Absent or Asn
  misc_feature (418)..(418): Lys or Phe or Ala or Absent or Val or Pro or Ile
  misc_feature (419)..(419): Tyr or Pro or Leu or Ala or Absent or Ile or Val
  misc_feature (420)..(420): Asn or Asp or His or Pro or Ala or Glu or Absent or Phe or Leu
  misc_feature (421)..(421): Leu or Gln or His or Lys or Ala or Ile or Pro
  misc_feature (422)..(422): Ser or Asn or Ala or Cys or Val or Glu or Pro or Lys or Thr
  misc_feature (423)..(423): Ser or Pro or Val or Asn or Thr or Ala or Asp or Lys
  misc_feature (424)..(424): Pro or Thr or Ser or Ala
  misc_feature (425)..(425): Val or Lys or Met or Gly or Ala or Thr or Ile or Ser or Gln or Absent
  misc_feature (426)..(426): Val or Leu or Pro or Ala or Ser
  misc_feature (427)..(427): Ala or Asn or Pro or Cys or Thr or Met or Lys
  misc_feature (428)..(428): Lys or Ser or Thr or Val or Glu or Arg or Gly
  misc_feature (429)..(429): Thr or Arg or Asp or Ala or Gln or Asn or Lys or Ser or Gly
  misc_feature (430)..(430): Lys or Ser or Gln or Asn or Thr
  misc_feature (431)..(431): Lys or His or Asp or Gln or Leu or Arg or Ala
  misc_feature (432)..(432): Cys or Lys or Pro or Val or Leu
  misc_feature (433)..(433): Lys or X or Trp or Absent or Asp or His or Asn or Gln
  misc_feature (434)..(434): Absent or Pro
  misc_feature (435)..(435): Absent or Lys
  misc_feature (436)..(436): Leu or Val or Met or Ile or Pro or Ala or Absent
  misc_feature (437)..(437): Lys or Met or Ala or Absent
  misc_feature (438)..(438): Glu or Ser or Arg or Lys or Asn
  misc_feature (439)..(439): Glu or Absent or X or Lys or Arg or Asp
  misc_feature (440)..(440): Glu or Pro or Val or Gly or Lys
  misc_feature (441)..(441): Asp or Lys or Glu or Absent
  misc_feature (442)..(442): Asp or Met or Lys or Arg or Absent
  misc_feature (443)..(443): Absent or Arg or Glu or Ser or Ala or Lys
  misc_feature (444)..(444): Absent or Leu or Met or Asp or Ala or Arg or Ser or Thr
  misc_feature (445)..(445): Absent or Ile or Glu or Ala or Asp or Arg or Thr or Lys or Ser
  misc_feature (446)..(446): Ala or Lys or Val or Glu or Met or Thr or Asn
  misc_feature (447)..(447): Ala or Lys or Asn or Glu or Asp or Gly
  misc_feature (448)..(448): Ile or Thr or X or Arg or Phe or His or Ser or Gly
  misc_feature (449)..(449): Val or Ile or Ser or Asn or Phe or His or Ala
  misc_feature (450)..(450): Ala or Thr or Leu or Val or Ser or Pro
  misc_feature (451)..(451): Gly or Asn or Pro or His or Gln
  misc_feature (452)..(452): Asp or Asn or Phe or Met or Tyr
  misc_feature (454)..(454): Glu or Gln or Lys or Asn
  misc_feature (455)..(455): Ile or Ala or Ser or Arg or Lys or Leu
  misc_feature (456)..(456): Ser or Ile or Absent or Cys or Tyr or Arg
  misc_feature (458)..(458): Ser or His or Absent or Met or Leu or Pro or Phe
  misc_feature (459)..(459): Thr or Val or Ser or Pro or Gly or Ala
  misc_feature (460)..(460): Thr or Asn or Arg or Val or Absent or Ile or Glu or Ala
  misc_feature (461)..(461): Ser or Val or Absent or Pro or Thr or Gln or Gly or Ala
  misc_feature (462)..(462): Ser or X or Absent or Asp or Thr or Pro
  misc_feature (463)..(463): Absent or His or Thr or Ala
  misc_feature (464)..(464): Absent or Ala or Val or Thr or Lys
  misc_feature (465)..(465): Absent or Ala or Thr
  misc_feature (466)..(466): Absent or Gly or Ala
  misc_feature (467)..(467): Absent or Ala
  misc_feature (468)..(468): Absent or Ala or Val
  misc_feature (469)..(469): Absent or Ala
  misc_feature (470)..(470): Absent or Ala
  misc_feature (471)..(471): Absent or Thr
  misc_feature (472)..(472): Absent or Ala or Lys
  misc_feature (473)..(473): Absent or Thr or Pro
  misc_feature (474)..(474): Absent or Pro or Thr
  misc_feature (475)..(475): Absent or Glu or Ala
  misc_feature (476)..(476): Absent or Ala
  misc_feature (477)..(477): Absent or Gly
  misc_feature (478)..(478): Absent or Glu
  misc_feature (479)..(479): Absent or Val
  misc_feature (480)..(480): Absent or Val
  misc_feature (481)..(481): Absent or Ala
  misc_feature (482)..(482): Absent or Ala
  misc_feature (483)..(483): Absent or Ala
  misc_feature (484)..(484): Absent or Arg or Pro
  misc_feature (485)..(485): Absent or Ser or Lys
  misc_feature (486)..(486): Absent or Thr or Asp
  misc_feature (487)..(487): Absent or Lys or Gln
  misc_feature (488)..(488): Absent or Asp
  misc_feature (489)..(489): Absent or Gln or His
  misc_feature (490)..(490): Absent or Ala or Val
  misc_feature (491)..(491): Absent or Asp or Ile
  misc_feature (492)..(492): Absent or His or Val
  misc_feature (493)..(493): Absent or Val
  misc_feature (494)..(494): Absent or Ser or Gly
  misc_feature (495)..(495): Absent or Gly
  misc_feature (496)..(496): Absent or Asp or Glu
  misc_feature (497)..(497): Absent or Lys or Asn
  misc_feature (498)..(498): Absent or Gln or Ala or Thr
  misc_feature (499)..(499): Absent or Val or Ala
  misc_feature (500)..(500): Absent or Val or Ala or Gly
  misc_feature (501)..(501): Absent or Ala or Thr or Ser
  misc_feature (502)..(502): Gly or Met or Absent or Asn or Pro or Ser or Leu or Arg or Ala
  misc_feature (503)..(503): Ser or Met or Absent or Ala or Glu or Gln or Gly or Lys or Cys
  misc_feature (504)..(504): Ser or Ile or Absent or Ala or Pro or Gly or Tyr or Glu
  misc_feature (505)..(505): Val or Ile or Absent or Ala or Gln or Arg or Thr
  misc_feature (506)..(506): Leu or Absent or Ser or Met or Gln or Arg or Lys or Asn
  misc_feature (507)..(507): Pro or Absent or Ser or Arg or Asn or Lys
  misc_feature (508)..(508): Asn or Absent or Ser or Pro or Lys or Leu or Phe
  misc_feature (509)..(509): Lys or Absent or Leu or Ile or Phe or Glu or Cys or Gly
  misc_feature (510)..(510): Phe or Absent or Asp or Ser or Val or Tyr or Ala
  misc_feature (511)..(511): Cys or Absent or Gln or Lys or Pro or Phe
  misc_feature (512)..(512): Phe or Ile or Absent or Ser or Ala or Asn or Lys or Glu
  misc_feature (513)..(513): Asp or Glu or Absent or Ala or Pro or Asn
  misc_feature (514)..(514): Asp or Glu or Absent or Ile or Ala or Phe or Leu
  misc_feature (515)..(515): Leu or Asp or Absent or Ala or Thr or His or Ser
  misc_feature (516)..(516): Thr or Ala or Absent or Leu or Ile or Ser
  misc_feature (517)..(517): Ile or Tyr or Pro or Absent or Ala or Glu or Ser or Leu or Thr or Val
  misc_feature (518)..(518): Leu or Ala or Absent or Met or Pro or Thr or Ser or Ile or Arg
  misc_feature (519)..(519): Leu or Absent or Pro or Ala or Asn or Arg
  misc_feature (521)..(521): Lys or His or Absent or Ala or Ser or Asn
  misc_feature (522)..(522): Ser or Lys or Absent or Val or His or Asn
  misc_feature (523)..(523): Ser or Thr or Absent or Pro or Leu
  misc_feature (525)..(525): Tyr or Leu or Absent or Phe or Met
  misc_feature (526)..(526): Gln or Lys or Absent or His or Phe or Glu
  misc_feature (527)..(527): Gln or Glu or Absent or Ala or His or Arg or Lys
  misc_feature (528)..(528): Val or Asp or Absent or Ala or Gly or Met or Leu
  misc_feature (529)..(529): Phe or His or Absent or Leu
  misc_feature (531)..(531): Gln or Glu or Absent or Ala or Arg or His or Pro
  misc_feature (534)..(534): Absent or Ile or Val
  misc_feature (535)..(535): Lys or Absent or Thr or Glu or Ala
  misc_feature (539)..(539): Ile or Met or Absent or Val or Leu
  misc_feature (543)..(543): Ala or Leu or Absent or Thr or Asp or Glu
  misc_feature (546)..(546): Tyr or Absent or Cys
  misc_feature (548)..(548): Met or Absent or Leu or Phe
  misc_feature (551)..(551): Gly or Absent or Ser or Val or Leu
  misc_feature (552)..(552): Absent or Phe
  misc_feature (553)..(553): Absent or Pro
  misc_feature (554)..(554): Absent or Thr
  misc_feature (555)..(555): Absent or Asp
  misc_feature (556)..(556): Absent or Arg
  misc_feature (557)..(557): Absent or Tyr
  misc_feature (558)..(558): Absent or Val
  misc_feature (559)..(559): Absent or Asn
  misc_feature (560)..(560): Absent or Tyr
  misc_feature (561)..(561): Absent or Leu
  misc_feature (562)..(562): Absent or Asp
  misc_feature (563)..(563): Absent or Leu
  unsure (1)..(563): unsure at all Xaa locations
XXXXXXXXXXXXXXXXXXXXXXXXXXXXXXXXXXXXXXXXXXXXXXXXXXXXXXXXXXXXXXXXXXXXXXXXXXXXXXXXXXXXXXXXXXXXXXXXXXXXXXXXXXXXXXXXXXXXXXXXXXXXXXXXXXXXXXXXXXXXXXXXXXXXXXXXXXXXXXXXXXXXXXXXXXXXXXXXXXXXXXXXXXXXXXXXXXXXXXXXXXXXXXXXXXXXXXXXXXXXXXXXXXXXXXXXXXXXXXXXXXXXXXXXXXXXXXXXXXXXXXXXXXXXXXXXXXXXXXXXXXXXXXXXXXXXXXXXXXXXXXXXXXXXXXXXXXXXXXXXXXXXXXXXXXXXXXXXXXXXXXXXXXXXXXXXXXXXXXXXXXXXXXXXXXXXXXXXXXXXXGXXGXXXXXXAXXXXQRXXXXXXXXXXXXXXXXXXXXXXXXXXXXXXXXXXXXXXXXXXXXXXXXXXXXXXKXXXKXXXXXXXXXXXXXXXXXXXXXXXXXXXXXXXXXXXXXXXXXXXXXXXXXXXXXXXXXXXXXXSXXXAXXXXXPXDEXXEAAXLLMXLSXGXVHXXXXXXXXXXXXX

SEQ ID NO: 36475 - protein, 371 aa, Artificial sequence
  consensus sequence of seq id no: 583  and its homologs
  misc_feature (1)..(1): Absent or Met
  misc_feature (2)..(2): Absent or Ser or Met
  misc_feature (3)..(3): Absent or Ala or Thr or Ser
  misc_feature (4)..(4): Absent or Ala or Thr or Met or Asn
  misc_feature (5)..(5): Absent or Val or Pro or Ser or Leu
  misc_feature (6)..(6): Absent or Ala or His or Glu or Asn or Asp
  misc_feature (7)..(7): Absent or Ala or Asp or Gly or Lys or Asn
  misc_feature (8)..(8): Absent or Ser or Pro or Thr or Gln or Met
  misc_feature (9)..(9): Absent or Ser or Ala or Glu or Asp or Asn or Lys
  misc_feature (10)..(10): Absent or Gly or Thr or Ala or Ser or Pro
  misc_feature (11)..(11): Absent or Ala or Thr or Pro or Val
  misc_feature (12)..(12): Absent or Pro or Lys or Glu
  misc_feature (13)..(13): Met or Ala or His or Lys or Absent or Ile
  misc_feature (14)..(14): Ala or Val or Absent or His or Ser or Thr
  misc_feature (15)..(15): Asp or Absent
  misc_feature (16)..(16): Val or Ser or Absent
  misc_feature (17)..(17): Glu or Ser or Leu or Absent or Val
  misc_feature (18)..(18): Lys or Pro or Glu or Absent or Ala or Ser
  misc_feature (19)..(19): Ala or Gly or Ser or Absent or Thr
  misc_feature (20)..(20): Ala or Thr or Pro or Absent
  misc_feature (21)..(21): Pro or Ala or Absent or Lys or Glu
  misc_feature (22)..(22): Val or Ala or Pro or Absent or Thr
  misc_feature (23)..(23): Ala or Pro or Absent or Glu or Lys
  misc_feature (24)..(24): Ala or Asp or Thr or Absent or Val
  misc_feature (25)..(25): Pro or Ala or Absent or Thr or Ser
  misc_feature (26)..(26): Pro or Asn or Absent or Gln or Glu
  misc_feature (27)..(27): Ala or Val or Pro or Absent or Ser or Gly
  misc_feature (28)..(28): Glu or Asp or Val or Ala or Absent or Ser or Thr
  misc_feature (29)..(29): Gly or Pro or Ala or Absent
  misc_feature (30)..(30): Absent or Gly or Ala or Ser
  misc_feature (31)..(31): Absent or Gly or Asp or Glu
  misc_feature (32)..(32): Ala or Val or Gly or Absent
  misc_feature (33)..(33): Ala or Pro or Glu or Absent or His
  misc_feature (34)..(34): Gly or Ala or Asn or Absent or Leu
  misc_feature (35)..(35): Asp or Ala or Gln or Gly or Absent
  misc_feature (36)..(36): Ala or Thr or Pro or Absent
  misc_feature (37)..(37): Ala or Gly or Absent
  misc_feature (38)..(38): Gly or Ala or Ser or Absent
  misc_feature (39)..(39): Gly or Ser or Absent or Ala
  misc_feature (40)..(40): Arg or Gly or Thr or Ser or Absent
  misc_feature (41)..(41): Thr or Glu or Arg or Ala or Absent or His or Met
  misc_feature (42)..(42): Gly or Phe or Absent or Ser or Pro
  misc_feature (43)..(43): Ala or Val or Gly or Absent or Ser or Glu
  misc_feature (44)..(44): Val or Ala or Ile or Absent or Phe or Thr or Met
  misc_feature (45)..(45): Gly or Ser or Pro or Absent or Val or Glu or Asp or Ala
  misc_feature (46)..(46): Ala or Absent or Gly or Thr or Asn or Asp or Pro or Met
  misc_feature (47)..(47): Val or Ile or Absent or Met or Ser or Thr or Pro
  misc_feature (48)..(48): Leu or Val or Arg or Absent or Thr or Met or Ala or Asn or Pro
  misc_feature (49)..(49): Arg or Absent or Gln or Ala or Gly or Thr or Ser or Pro or Met or Lys
  misc_feature (50)..(50): Arg or Absent or Ser or Pro or Phe or Ala or Thr or Gln or Lys or Glu
  misc_feature (51)..(51): Trp or Absent or Lys or Arg or Ser or Pro or His
  misc_feature (52)..(52): Arg or Lys or Absent or Asp or Ser or Thr or Pro or Val or Ala
  misc_feature (53)..(53): Thr or Arg or Absent or Ser or Lys or Pro or Ala or Gly or Leu
  misc_feature (54)..(54): Gln or Glu or Absent or Ala or Arg or Ser or Ile or Thr
  misc_feature (55)..(55): Asp or Ala or Absent or Arg or Thr or Val or Ser or Lys or Asn or Leu or Met
  misc_feature (56)..(56): Leu or Phe or Ile or Absent or Ser or Ala or Gly or Val or Thr or Pro
  misc_feature (57)..(57): Leu or Absent or Ile or Val or His or Ala or Ser or Phe or Tyr or Pro
  misc_feature (58)..(58): Asp or Glu or Lys or Gln or Absent or Leu or Ala or Val or Pro or Arg or Ser or Thr
  misc_feature (59)..(59): Arg or Lys or Absent or Val or Ile or Asn or Met or Thr or Ala or Ser or Phe or Tyr
  misc_feature (60)..(60): Ser or Gly or Absent or Ala or Val or Thr or Leu or Ile
  misc_feature (61)..(61): Gly or Ser or Absent or Cys or Thr or Ala or Val or Leu or Pro
  misc_feature (63)..(63): Ala or Gly or Absent or Ile or Val or Leu or Phe
  misc_feature (66)..(66): Ala or Val or Gly or Absent or Leu or Ile
  misc_feature (69)..(69): Trp or Leu or Phe or Absent or Ala or Gly
  misc_feature (70)..(70): Ala or Val or Leu or Absent or Gly or Ile
  misc_feature (71)..(71): Leu or Phe or Cys or Absent or Ala or Ile or Ser
  misc_feature (72)..(72): Ser or Absent or Leu or Ile
  misc_feature (73)..(73): Leu or Absent or Ala or Val or Ile or Ser or Met
  misc_feature (74)..(74): Leu or Absent or Ile or Ala or Thr or Met or Val
  misc_feature (75)..(75): Ala or Ser or Absent or Cys or Thr
  misc_feature (76)..(76): Phe or Absent or Ile or Val or Leu
  misc_feature (77)..(77): Leu or Val or Ile or Absent or Phe or Ala or Thr
  misc_feature (78)..(78): Val or Ile or Absent or Leu or Phe
  misc_feature (79)..(79): Met or Leu or Phe or Ile
  misc_feature (80)..(80): Ala or Gly or Val or Ile or Ser or X or Thr
  misc_feature (81)..(81): Cys or Ala or Ser or Thr or Ile or X or Asn
  misc_feature (83)..(83): Glu or Asp or Lys or Gln or Thr or Asn or Ala or Ser
  misc_feature (84)..(84): His or Phe or Arg or Ile or Leu or Gln or Val or Ala or Thr or Gly
  misc_feature (85)..(85): Gly or Arg or Lys or Thr or Tyr or Asn or Pro or Ser
  misc_feature (86)..(86): Absent or Tyr or Glu or Ala or Val or Leu or Ile or Asp or Phe or Met
  misc_feature (87)..(87): Absent or Ser or Ala or Tyr or Gly or Asp or Glu or Val or Lys
  misc_feature (88)..(88): Absent or Asn or Met or Asp or Pro or Phe or Gly or Glu or Thr or Ile or Ser or Val or Leu
  misc_feature (89)..(89): Absent or Ile or Phe or Leu or Gly or Ser or Thr or Gln or Val or Asp or Asn or Lys
  misc_feature (90)..(90): Absent or Asp or Ser or Ile or Arg or Gly or Ala or Phe or Tyr or Leu
  misc_feature (91)..(91): Absent or Asn or Ala or Asp or Tyr
  misc_feature (92)..(92): Absent or Gly or Leu or Val or Ser or Ala
  misc_feature (93)..(93): Absent or Leu or Val or Glu or Ser
  misc_feature (94)..(94): Absent or Asp or Glu
  misc_feature (95)..(95): Absent or Glu or Pro or Asn
  misc_feature (96)..(96): Absent or Asp or Tyr
  misc_feature (97)..(97): Absent or Ile
  misc_feature (98)..(98): Absent or Asp
  misc_feature (99)..(99): Absent or Ala
  misc_feature (100)..(100): Absent or Gly
  misc_feature (101)..(101): Absent or Asp
  misc_feature (102)..(102): Absent or Phe or Gly or Ser
  misc_feature (103)..(103): Absent or Gly or Leu or Asp
  misc_feature (104)..(104): Absent or Gln or Pro or Leu or Val or Thr or Ser or Gly or Asp
  misc_feature (105)..(105): Absent or Ile or Pro or Ser or Tyr or Ala or Asp or Glu or Lys
  misc_feature (106)..(106): Asp or Tyr or Ser or Thr or His or Pro or Lys or Gln or Val or Ala or Glu or Ile or Leu or Phe
  misc_feature (107)..(107): Trp or Gly or Lys or Asp or Asn or Arg or Glu
  misc_feature (108)..(108): Lys or Arg or Thr or Val or Met or Ile or Phe or Tyr or Leu
  misc_feature (109)..(109): Gln or Asn or Asp or Glu or Ile or Thr or Ser or Lys or Pro or Tyr or His or Arg
  misc_feature (111)..(111): Asp or Glu or Asn or Thr or Lys or Gln or Arg or His
  misc_feature (113)..(113): Tyr or Val or Leu or Absent or Phe or Arg or Ile
  misc_feature (114)..(114): Glu or Ile or Thr or Absent or Phe or Leu or Tyr or His
  misc_feature (115)..(115): Glu or Ala or Thr or Leu or Ser
  misc_feature (119)..(119): Ile or Val or Thr or Leu or Met
  misc_feature (120)..(120): Val or Leu or Phe or Ala or Ile
  misc_feature (121)..(121): Ala or Gly or Ser or Phe
  misc_feature (122)..(122): Ile or Ala or Thr or Val
  misc_feature (123)..(123): Gly or Ala or Ser or Ile or Val or Leu
  misc_feature (124)..(124): Leu or Val or Ile or Ala
  misc_feature (125)..(125): Leu or Ile or Val or Phe
  misc_feature (127)..(127): Absent or X or Cys or Ala or Phe or Gly or Leu or Met
  misc_feature (128)..(128): Phe or Thr or Ser or Absent or X
  misc_feature (129)..(129): Val or Ile or Leu or Phe or Ala or Pro or Thr
  misc_feature (132)..(132): Thr or Gly or Ala or Leu or Val or Phe or Ile
  misc_feature (133)..(133): Leu or Gly or Ala or Trp or Ile or Val or X or Met
  misc_feature (135)..(135): Leu or Val or Ala or Thr or Ile or Met
  misc_feature (136)..(136): Leu or Val or Phe or Pro or Ser or Ala or Gly
  misc_feature (137)..(137): Arg or Val or Ala or Phe or Leu
  misc_feature (138)..(138): His or Gln or Asn or Tyr or Ala or Thr or Val or Ser or Gly or Arg
  misc_feature (139)..(139): Gly or Val or Ile or Leu or Phe or Ala or Met
  misc_feature (140)..(140): Val or His or Gln or Ser or Tyr or Ile or Phe or Asn
  misc_feature (141)..(141): Arg or Glu or Lys or Tyr or His or Ala or Ser or Thr or Gln or Leu
  misc_feature (142)..(142): Absent or Leu or Ala or Ile or Val or Phe or X
  misc_feature (143)..(143): Leu or Tyr or Ser or Absent or Cys or Val or Ile or Ala or Thr
  misc_feature (144)..(144): Thr or Absent or Lys or Val or Ala or Ser or Met
  misc_feature (145)..(145): Gly or Ala or Absent or Glu or Gln or Lys or Ser or Arg
  misc_feature (146)..(146): Gly or Asn or Lys or Arg or Glu or Ile or Val
  misc_feature (147)..(147): Gln or Leu or Glu or Absent or Asn or Lys or Arg or Gly
  misc_feature (148)..(148): Asp or Met or Ile or Leu or Phe or Absent or Asn or Ser
  misc_feature (149)..(149): Leu or Phe or Absent or Lys or Ala
  misc_feature (150)..(150): Gln or Ser or Glu or Asp or Arg or Asn or Thr or Lys or Absent or Leu or Ile or Ala
  misc_feature (151)..(151): Pro or Gly or Arg or Lys or Leu or Met or Absent or Val or His or Asn or Ser or Gln
  misc_feature (152)..(152): Lys or Trp or Gln or Arg or Ile or Leu or Val or Pro or Gly or Ser or Met or Thr
  misc_feature (153)..(153): Thr or Val or Ser or Met or Gln or Lys or Arg or Gly or Leu or Ile or Phe or Ala or Absent
  misc_feature (154)..(154): Gly or Ala or Thr or Ser or Asn or Val or Absent or Arg or His
  misc_feature (155)..(155): Absent or Asp or Thr or Gly or Ser or Tyr or Asn or Glu
  misc_feature (156)..(156): Absent or Phe or Ile or Arg or Glu or Gly or Ser
  misc_feature (157)..(157): Absent or Leu or Gly or His or Asn or Phe
  misc_feature (158)..(158): Absent or Ser
  misc_feature (159)..(159): Absent or Val
  misc_feature (160)..(160): Absent or Ala
  misc_feature (161)..(161): Absent or Val
  misc_feature (162)..(162): Absent or Ala
  misc_feature (163)..(163): Absent or Phe or Ala or Val or Leu
  misc_feature (164)..(164): Leu or Val or Ser or Ala or Met or Ile or Pro or Thr or Tyr
  misc_feature (165)..(165): Leu or Met or Asn or Glu or Trp or Ala or Val or Gln or Pro or Lys
  misc_feature (166)..(166): Val or Phe or Leu or Ile
  misc_feature (169)..(169): Ala or Ile or Phe or Ser or Tyr or Leu
  misc_feature (172)..(172): Gln or Lys or Val
  misc_feature (173)..(173): Val or Ile or Leu or Met or Phe
  misc_feature (174)..(174): Thr or Val or Leu or Ile or Phe or Met
  misc_feature (175)..(175): Ala or Ser or Cys or Val or Ile
  misc_feature (176)..(176): Tyr or Ile or Phe or Leu or Ala or Val or Met or Ser
  misc_feature (179)..(179): Met or Ile or Val or Ala or Gly or Thr or Arg or X
  misc_feature (180)..(180): Ser or Cys or Thr or Absent or Ala
  misc_feature (182)..(182): Leu or Val or Ala or Gly or Ser or Absent or Thr
  misc_feature (183)..(183): Ser or Gly or Ala or Absent
  misc_feature (185)..(185): Ala or Gly or Glu or Absent or Ser or X
  misc_feature (186)..(186): Ile or Val or Leu or Phe or Absent
  misc_feature (187)..(187): Pro or Ala or Gly or Absent
  misc_feature (188)..(188): Ile or Met or Leu or Val or Phe or Absent or Ala or Ser
  misc_feature (190)..(190): Asn or Leu or Val or Phe or Tyr or Ser or Absent or Lys or Gln or Ile
  misc_feature (191)..(191): Arg or Ile or Glu or Asp or Absent
  misc_feature (192)..(192): Met or Phe or Leu or Ile or Asn or Ser or Ala or Val or Absent
  misc_feature (193)..(193): Arg or Lys or Gln or Absent
  misc_feature (194)..(194): Absent or Gly or Ser or Arg or Asp or Gln or Lys or Glu or Pro or Thr
  misc_feature (195)..(195): Absent or Ile or Leu or Asn or Phe or Ala or Tyr or Thr or Val or Gln
  misc_feature (196)..(196): Absent or Leu or Asn or Pro or Phe or Tyr or Glu or Ser
  misc_feature (197)..(197): Absent or Lys or Asn or Gly or Gln or Glu or Asp or Ile or Leu or Ser or Ala
  misc_feature (198)..(198): Absent or Glu or Asp or Lys or Phe or Gly or Val or Tyr or Ala
  misc_feature (199)..(199): Absent or Tyr or Leu or Phe or Ser or Gln or Thr or Asp
  misc_feature (200)..(200): Absent or Tyr or Phe or Val or Ile or Glu or Leu or Gly
  misc_feature (201)..(201): Absent or Asn or Asp or Gln or Glu or Ala or Arg
  misc_feature (202)..(202): Absent or Asp or Ala or Gly or Leu or Phe
  misc_feature (203)..(203): Absent or Phe or Val or Asp
  misc_feature (204)..(204): Absent or Ser or Ala or Glu or Arg
  misc_feature (205)..(205): Absent or Asp or Leu or Ile or Arg
  misc_feature (206)..(206): Absent or Ile or Ala or Leu or Gly or Met
  misc_feature (207)..(207): Absent or Pro or Gly or Ser or Asn
  misc_feature (208)..(208): Absent or Ile
  misc_feature (209)..(209): Absent or Tyr
  misc_feature (210)..(210): Absent or Gly
  misc_feature (211)..(211): Absent or Ser
  misc_feature (212)..(212): Absent or Gly or Phe or Thr or Ala
  misc_feature (213)..(213): Absent or Ile or Gln or Pro or Asn or Leu
  misc_feature (214)..(214): Absent or Asp or Glu or Gly or Leu
  misc_feature (215)..(215): Absent or Glu or Thr or Leu or Val or Phe
  misc_feature (216)..(216): Absent or Gln or Glu or Ser or Asp
  misc_feature (217)..(217): Absent or Arg or Asp or Glu or Lys or Gln or Gly or Leu
  misc_feature (218)..(218): Absent or Ser or Phe or Leu or Val or Arg or Gln or Ile
  misc_feature (219)..(219): Glu or Lys or Asp or Gly or Pro or His or Gln or Arg or Absent or Thr or Ser or Ala or Leu
  misc_feature (220)..(220): Gly or Ser or Ala or Pro or Arg or Leu or Val or Ile or Absent or Asp
  misc_feature (221)..(221): Ala or Gln or Ile or Leu or Lys or Gly or Asp or Glu or Pro or Val or Absent or Asn
  misc_feature (222)..(222): Asp or Arg or Tyr or Thr or His or Leu or Ser or Val or Met or Absent or Ala or Phe
  misc_feature (223)..(223): Asn or Absent or Asp or Glu or Arg or Ser or Lys or Val
  misc_feature (224)..(224): Val or Ile or Absent or Asn or Lys or Arg or Ser or Asp or Ala
  misc_feature (226)..(226): Thr or Leu or Ile or Tyr or Phe or Met or Absent
  misc_feature (227)..(227): Asp or Asn or Thr or Lys or Glu or Gln or Leu or Ser or Absent
  misc_feature (228)..(228): Ser or Arg or Lys or Leu or Met or Absent or Thr
  misc_feature (229)..(229): Ser or Leu or Ala or Gly or Phe or Val or Absent
  misc_feature (230)..(230): Ala or Tyr or Ile or Asp or Ser or Asn or Absent
  misc_feature (231)..(231): Ala or Ser or Ile or Val or Leu or Absent
  misc_feature (232)..(232): Ser or Ala or Absent
  misc_feature (233)..(233): Ile or Ser or Thr or Cys or Ala or Absent
  misc_feature (234)..(234): Ser or Gly or Val or Absent
  misc_feature (235)..(235): Absent or Thr
  misc_feature (236)..(236): Absent or Lys
  misc_feature (237)..(237): Absent or Gly
  misc_feature (238)..(238): Absent or Met
  misc_feature (239)..(239): Absent or Leu
  misc_feature (240)..(240): Absent or Ser
  misc_feature (241)..(241): Absent or Lys
  misc_feature (242)..(242): Absent or Ile
  misc_feature (243)..(243): Absent or Val
  misc_feature (244)..(244): Absent or Gly
  misc_feature (245)..(245): Absent or Leu
  misc_feature (246)..(246): Absent or Thr
  misc_feature (247)..(247): Absent or Ile
  misc_feature (248)..(248): Absent or Ala
  misc_feature (249)..(249): Absent or Ser
  misc_feature (250)..(250): Absent or Trp
  misc_feature (251)..(251): Absent or Arg
  misc_feature (252)..(252): Absent or Phe
  misc_feature (253)..(253): Absent or Gly
  misc_feature (254)..(254): Absent or Thr
  misc_feature (255)..(255): Absent or Leu
  misc_feature (256)..(256): Absent or Ser
  misc_feature (257)..(257): Absent or Arg
  misc_feature (258)..(258): Absent or Glu
  misc_feature (259)..(259): Absent or Pro
  misc_feature (260)..(260): Absent or Ile
  misc_feature (261)..(261): Met or Leu or Ala or Absent or Phe
  misc_feature (262)..(262): Ala or Ser or Gly or Leu or Gln or Met or Absent or Cys or Ile
  misc_feature (263)..(263): Phe or Ile or Val or Leu or Ala or His or Absent
  misc_feature (264)..(264): Phe or Leu or Ala or Val or Gly or Ile or Absent
  misc_feature (265)..(265): Ala or Gly or Thr or Absent
  misc_feature (267)..(267): Val or Leu or Phe or Ile or Ala or Absent
  misc_feature (268)..(268): Cys or Ser or Val or Ala or Leu or Phe or Absent
  misc_feature (269)..(269): Absent or X
  misc_feature (270)..(270): Leu or Ser or Met or Thr or Absent or Ala or X
  misc_feature (271)..(271): Ala or Gly or Val or Glu or Absent
  misc_feature (272)..(272): Leu or Val or Ile or Phe or Thr or Absent or Ala
  misc_feature (273)..(273): Ser or Leu or Val or Arg or Met or Ile or Ala or Absent
  misc_feature (274)..(274): Ala or Ser or Thr or Ile or Val or Absent
  misc_feature (275)..(275): Leu or Val or Glu or Met or Thr or Ile or Absent
  misc_feature (276)..(276): Ile or Val or Phe or Leu or Absent or Cys
  misc_feature (278)..(278): Gly or Ser or Val or Ala or Ile or Absent
  misc_feature (279)..(279): Phe or Tyr or Ile or Val or Leu or Ser or Arg or His or Absent
  misc_feature (280)..(280): Lys or Asn or Ser or Leu or Ala or Absent or Thr
  misc_feature (282)..(282): Ala or Ser or Absent or Asp or Asn or Ile or Val or Pro
  misc_feature (283)..(283): Lys or Thr or Absent or Gly or Arg or Asn
  misc_feature (284)..(284): Gln or Ser or His or Absent or Leu or Lys or Arg or Tyr
  misc_feature (285)..(285): Thr or Ser or Absent or Ile or Val or Ala or Asp or Pro or Asn or Leu
  misc_feature (286)..(286): Tyr or Phe or Absent or Pro or Arg or Asn or Ile or Val or Asp
  misc_feature (287)..(287): Ile or Val or Absent or Asp or Ser or Asn or Pro
  misc_feature (288)..(288): Absent or Glu or Asp or Val or Ala
  misc_feature (289)..(289): Absent or Tyr or Ser or Gln
  misc_feature (290)..(290): Absent or Val or Ile or Ser
  misc_feature (291)..(291): Absent or Val or Ser
  misc_feature (292)..(292): Absent or Lys or Val
  misc_feature (293)..(293): Absent or Val or Asn
  misc_feature (294)..(294): Absent or Lys or Arg or Val
  misc_feature (295)..(295): Absent or Thr or Asn or Ser
  misc_feature (296)..(296): Absent or Ser or Lys or Val or Ala
  misc_feature (297)..(297): Absent or Thr or Val or Lys
  misc_feature (298)..(298): Absent or Lys or Thr or Asp or Ser
  misc_feature (299)..(299): Absent or Lys or Ser
  misc_feature (300)..(300): Absent or Ser or Leu or Lys
  misc_feature (301)..(301): Absent or Gly
  misc_feature (302)..(302): Absent or Phe or Ser
  misc_feature (303)..(303): Absent or Phe or Ile
  misc_feature (304)..(304): Absent or Gly
  misc_feature (305)..(305): Absent or Lys
  misc_feature (306)..(306): Absent or Pro
  misc_feature (307)..(307): Absent or Val
  misc_feature (308)..(308): Absent or Leu
  misc_feature (309)..(309): Absent or Asp
  misc_feature (310)..(310): Absent or Lys
  misc_feature (311)..(311): Absent or Asp
  misc_feature (312)..(312): Absent or Gln
  misc_feature (313)..(313): Absent or Leu
  misc_feature (314)..(314): Absent or Ile
  misc_feature (315)..(315): Absent or Tyr
  misc_feature (316)..(316): Absent or Leu
  misc_feature (317)..(317): Absent or Phe
  misc_feature (318)..(318): Absent or Gln
  misc_feature (319)..(319): Absent or Gly
  misc_feature (320)..(320): Absent or Leu
  misc_feature (321)..(321): Absent or Gly
  misc_feature (322)..(322): Absent or Ala
  misc_feature (323)..(323): Absent or Glu
  misc_feature (324)..(324): Absent or Tyr
  misc_feature (325)..(325): Absent or Asn
  misc_feature (326)..(326): Absent or Pro
  misc_feature (327)..(327): Absent or Phe
  misc_feature (328)..(328): Absent or Val
  misc_feature (329)..(329): Absent or Thr
  misc_feature (330)..(330): Absent or Ser
  misc_feature (331)..(331): Absent or Phe
  misc_feature (332)..(332): Absent or Asn
  misc_feature (333)..(333): Absent or Asp
  misc_feature (334)..(334): Absent or Ile
  misc_feature (335)..(335): Absent or Ser
  misc_feature (336)..(336): Absent or Asn
  misc_feature (337)..(337): Absent or Gln
  misc_feature (338)..(338): Absent or Pro
  misc_feature (339)..(339): Absent or Thr
  misc_feature (340)..(340): Absent or Ile
  misc_feature (341)..(341): Absent or Glu
  misc_feature (342)..(342): Absent or Glu
  misc_feature (343)..(343): Absent or Arg
  misc_feature (344)..(344): Absent or Gln
  misc_feature (345)..(345): Absent or Asn
  misc_feature (346)..(346): Absent or Val
  misc_feature (347)..(347): Absent or Val
  misc_feature (348)..(348): Absent or Glu
  misc_feature (349)..(349): Absent or Gln
  misc_feature (350)..(350): Absent or Leu
  misc_feature (351)..(351): Absent or Asn
  misc_feature (352)..(352): Absent or Val
  misc_feature (353)..(353): Absent or Asn
  misc_feature (354)..(354): Absent or Met
  misc_feature (355)..(355): Absent or Ala
  misc_feature (356)..(356): Absent or Gln
  misc_feature (357)..(357): Absent or Ala
  misc_feature (358)..(358): Absent or Lys
  misc_feature (359)..(359): Absent or Leu
  misc_feature (360)..(360): Absent or Ala
  misc_feature (361)..(361): Absent or Val
  misc_feature (362)..(362): Absent or Phe
  misc_feature (363)..(363): Absent or Ala
  misc_feature (364)..(364): Absent or Asn
  misc_feature (365)..(365): Absent or Lys
  misc_feature (366)..(366): Absent or Lys
  misc_feature (367)..(367): Absent or Pro
  misc_feature (368)..(368): Absent or Phe
  misc_feature (369)..(369): Absent or Lys
  misc_feature (370)..(370): Absent or Ile
  misc_feature (371)..(371): Absent or Asn
  unsure (1)..(371): unsure at all Xaa locations
XXXXXXXXXXXXXXXXXXXXXXXXXXXXXXXXXXXXXXXXXXXXXXXXXXXXXXXXXXXXXLXLRXLTXXXXXXXXXXXXXNXXXXXXXXXXXXXXXXXXXXXXXXXXXFXDXXXYRYXXXXXXXGXXXYTXXQXXXXXXXXXXXXXXXXXXXXXXXXXXXXXXXXDFXGDXXXXXLLXXGXXAXXXXTXXXXXXXXXXXXXXXXXXXXXXXXXXXXXXXXXXXFXXXXXXXXXXXXXXXXXXXXXXXXXXXXXXXXXXXXXXXXFXXXXXXXXXXSXXXLXXXXXXXXXXXXXXXXXXXXXXXXXXXXXXXXXXXXXXXXXXXXXXXXXXXXXXXXXXXXXXXXXXXXXXXXXXXXXXXXXXXXXXXXXX

SEQ ID NO: 36476 - protein, 913 aa, Artificial sequence
  consensus sequence of seq id no: 603  and its homologs
  misc_feature (1)..(1): Absent or Met
  misc_feature (2)..(2): Absent or Ala
  misc_feature (3)..(3): Absent or Met
  misc_feature (4)..(4): Absent or Tyr
  misc_feature (5)..(5): Absent or Ser
  misc_feature (6)..(6): Absent or Leu
  misc_feature (7)..(7): Absent or Ser
  misc_feature (8)..(8): Absent or Asn
  misc_feature (9)..(9): Absent or Asp
  misc_feature (10)..(10): Absent or Pro
  misc_feature (11)..(11): Absent or Phe
  misc_feature (12)..(12): Absent or Ile
  misc_feature (13)..(13): Absent or His
  misc_feature (14)..(14): Absent or Val
  misc_feature (15)..(15): Absent or His
  misc_feature (16)..(16): Absent or Gly
  misc_feature (17)..(17): Absent or Leu
  misc_feature (18)..(18): Absent or Met
  misc_feature (19)..(19): Absent or Met
  misc_feature (20)..(20): Absent or Val
  misc_feature (21)..(21): Absent or Met
  misc_feature (22)..(22): Absent or Tyr
  misc_feature (23)..(23): Absent or Ser
  misc_feature (24)..(24): Absent or Leu
  misc_feature (25)..(25): Absent or Ser
  misc_feature (26)..(26): Absent or Asn
  misc_feature (27)..(27): Absent or Asp
  misc_feature (28)..(28): Absent or Leu
  misc_feature (29)..(29): Absent or Phe
  misc_feature (30)..(30): Absent or Ile
  misc_feature (31)..(31): Absent or Arg
  misc_feature (32)..(32): Absent or Ile
  misc_feature (33)..(33): Absent or Leu
  misc_feature (34)..(34): Absent or Trp
  misc_feature (35)..(35): Absent or Lys
  misc_feature (36)..(36): Absent or Lys
  misc_feature (37)..(37): Absent or Val
  misc_feature (38)..(38): Absent or Ile
  misc_feature (39)..(39): Absent or Met
  misc_feature (40)..(40): Absent or Val
  misc_feature (41)..(41): Absent or Thr
  misc_feature (42)..(42): Absent or Asn
  misc_feature (43)..(43): Absent or Arg
  misc_feature (44)..(44): Absent or Arg
  misc_feature (45)..(45): Absent or Arg
  misc_feature (46)..(46): Absent or Trp
  misc_feature (47)..(47): Absent or Val
  misc_feature (48)..(48): Absent or Glu
  misc_feature (49)..(49): Absent or Cys
  misc_feature (50)..(50): Absent or Tyr
  misc_feature (51)..(51): Absent or Lys
  misc_feature (52)..(52): Absent or Ile
  misc_feature (53)..(53): Absent or His
  misc_feature (54)..(54): Absent or Asp
  misc_feature (55)..(55): Absent or Arg
  misc_feature (56)..(56): Absent or Asp
  misc_feature (57)..(57): Absent or Pro
  misc_feature (58)..(58): Absent or Phe
  misc_feature (59)..(59): Absent or Gln
  misc_feature (60)..(60): Absent or Ala
  misc_feature (61)..(61): Absent or Thr
  misc_feature (62)..(62): Absent or Tyr
  misc_feature (63)..(63): Absent or Pro
  misc_feature (64)..(64): Absent or Cys
  misc_feature (65)..(65): Absent or Val
  misc_feature (66)..(66): Absent or Arg
  misc_feature (67)..(67): Absent or Leu
  misc_feature (68)..(68): Absent or Ile
  misc_feature (69)..(69): Absent or Lys
  misc_feature (70)..(70): Absent or Val
  misc_feature (71)..(71): Absent or Met
  misc_feature (72)..(72): Absent or Gln
  misc_feature (73)..(73): Absent or Lys
  misc_feature (74)..(74): Absent or Ala
  misc_feature (75)..(75): Absent or Phe
  misc_feature (76)..(76): Absent or Gly
  misc_feature (77)..(77): Absent or Ser
  misc_feature (78)..(78): Absent or Phe
  misc_feature (79)..(79): Absent or Ile
  misc_feature (80)..(80): Absent or Tyr
  misc_feature (81)..(81): Absent or Lys
  misc_feature (82)..(82): Absent or Met
  misc_feature (83)..(83): Absent or Leu
  misc_feature (84)..(84): Absent or Ala
  misc_feature (85)..(85): Absent or Phe
  misc_feature (86)..(86): Absent or Tyr
  misc_feature (87)..(87): Absent or Glu
  misc_feature (88)..(88): Absent or Tyr
  misc_feature (89)..(89): Absent or Met
  misc_feature (90)..(90): Absent or Thr
  misc_feature (91)..(91): Absent or Arg
  misc_feature (92)..(92): Absent or Gly
  misc_feature (93)..(93): Absent or Leu
  misc_feature (94)..(94): Absent or Asn
  misc_feature (95)..(95): Absent or Arg
  misc_feature (96)..(96): Absent or Phe
  misc_feature (97)..(97): Absent or His
  misc_feature (98)..(98): Absent or Leu
  misc_feature (99)..(99): Absent or Leu
  misc_feature (100)..(100): Absent or Leu
  misc_feature (101)..(101): Absent or Val
  misc_feature (102)..(102): Absent or Ala
  misc_feature (103)..(103): Absent or Tyr
  misc_feature (104)..(104): Absent or Lys
  misc_feature (105)..(105): Absent or Asn
  misc_feature (106)..(106): Absent or Pro
  misc_feature (107)..(107): Absent or Lys
  misc_feature (108)..(108): Absent or Cys
  misc_feature (109)..(109): Absent or Arg
  misc_feature (110)..(110): Absent or Asn
  misc_feature (111)..(111): Absent or Leu
  misc_feature (112)..(112): Absent or Leu or X
  misc_feature (113)..(113): Absent or Ala
  misc_feature (114)..(114): Absent or Ser
  misc_feature (115)..(115): Absent or Leu
  misc_feature (116)..(116): Absent or Ser
  misc_feature (117)..(117): Absent or Phe
  misc_feature (118)..(118): Absent or Gln or Met
  misc_feature (119)..(119): Absent or Val or Ile
  misc_feature (120)..(120): Absent or Lys or Phe
  misc_feature (121)..(121): Absent or Lys or Ser
  misc_feature (122)..(122): Absent or Ser or His or Met
  misc_feature (123)..(123): Absent or Lys or Ala or Gly
  misc_feature (124)..(124): Absent or Pro or Glu or Arg
  misc_feature (125)..(125): Absent or Leu or Asn or Arg
  misc_feature (126)..(126): Absent or Gln or Pro or Leu or Ser
  misc_feature (127)..(127): Absent or Ile or Ser or Met
  misc_feature (128)..(128): Absent or Leu or Asn or Ala or Thr or Met
  misc_feature (129)..(129): Absent or Phe or Glu or Ser or Thr or Asp or Ala
  misc_feature (130)..(130): Absent or Leu or Val or Ala or Ser or Thr or Glu
  misc_feature (131)..(131): Absent or Asn or Leu or Thr or Ala or Pro or Asp
  misc_feature (132)..(132): Absent or Pro or Arg or Ala or Ser
  misc_feature (133)..(133): Absent or Met or Thr or His or Ala or Pro
  misc_feature (134)..(134): Met or Ala or Absent or Arg or Val or Gly or Ser or Pro
  misc_feature (135)..(135): Ser or Glu or Thr or Absent or Met or Ala or Pro
  misc_feature (136)..(136): Glu or Asp or Asn or Lys or Absent or Thr or Ser or Pro or Ala or Met
  misc_feature (137)..(137): Asn or Glu or Ala or Gly or Pro or Ser or Absent or Leu or Arg
  misc_feature (138)..(138): Asn or Arg or Gly or Ser or Absent or Gln or Glu or Leu or Ala or Pro or Asp
  misc_feature (139)..(139): Ala or Glu or Gly or Ser or Asn or Absent or Asp or Pro or Leu or Val
  misc_feature (140)..(140): Asn or Val or Ser or Glu or Gln or Absent or Leu or Ala or Gly or Met
  misc_feature (141)..(141): Thr or Absent or Ser or Gln or His or Glu or Leu or Ala or Ile or Pro
  misc_feature (142)..(142): Thr or Ser or Leu or Phe or Gly or Ile or Absent or His or Arg or Pro or Ala or Glu
  misc_feature (143)..(143): Asp or Phe or Leu or Ser or Absent or Cys or Arg or Pro
  misc_feature (144)..(144): Pro or Leu or Ser or Arg or Asn or Absent or Val or Ile or Ala or Gly or Lys
  misc_feature (145)..(145): Leu or Ala or Pro or Gln or Glu or Ser or Absent or Gly or Asp or Lys
  misc_feature (146)..(146): Leu or Met or Lys or Absent or Thr or Glu or Ile or Gly or Ala
  misc_feature (147)..(147): Gly or Asn or Lys or Leu or Absent or Thr or Asp or Arg or Ser or Pro
  misc_feature (148)..(148): Arg or Lys or Met or Glu or Leu or Absent or Asp or Gly or Thr or Ser
  misc_feature (149)..(149): Lys or Glu or Asn or Pro or Absent or His or Gly or Ser
  misc_feature (150)..(150): Ser or Asn or Glu or Leu or Val or Absent or Asp or Gly or Pro
  misc_feature (151)..(151): Ser or His or Ala or Glu or Absent or Pro or Arg or Gly or Leu
  misc_feature (152)..(152): Absent or Ser or Lys or Gly or Arg or Gln or Ala
  misc_feature (153)..(153): Absent or Arg or Ser or Asp or Thr
  misc_feature (154)..(154): Absent or Gln or Asn or Ala or Arg or Lys or Thr
  misc_feature (155)..(155): Absent or Ser or Gln or Val or Gly or Ala
  misc_feature (156)..(156): Absent or Ala or Met or Leu or Ser or Gln or Arg
  misc_feature (157)..(157): Absent or Ile or Tyr or Leu or Phe
  misc_feature (158)..(158): Absent or Gly or Asn or Thr or Ile or Lys or Val or Glu or Gln or Ala
  misc_feature (159)..(159): Absent or Ile or Pro or Arg
  misc_feature (160)..(160): Absent or Tyr or Thr or Ala or Asn or His or Ile or Met or Cys or Ser
  misc_feature (161)..(161): Absent or His or Phe or Asn or Leu or Lys or Gln or Ala or Val or Met
  misc_feature (162)..(162): Absent or Asp or Phe or Lys or Leu or Gln or Ser
  misc_feature (163)..(163): Absent or Gly or His or Arg or Asn or Pro or Gln or Ser
  misc_feature (164)..(164): Absent or Gly or Asp or Pro or Ala
  misc_feature (165)..(165): Absent or Thr or Gly or Glu or Cys or Arg or Asp or Asn
  misc_feature (166)..(166): Absent or Lys or Thr or Ile or Phe or Ser or Asp
  misc_feature (167)..(167): Absent or Glu or Pro
  misc_feature (168)..(168): Absent or Leu or Met or Ala or Pro
  misc_feature (169)..(169): Absent or Arg or Lys or Ser or Thr or Gln or Gly or His
  misc_feature (170)..(170): Lys or Arg or Asn or Ser or Absent or Tyr or Trp
  misc_feature (171)..(171): Phe or Leu or Absent
  misc_feature (172)..(172): Thr or Arg or Pro or Ser or Absent
  misc_feature (173)..(173): Arg or Ala or Ser or Leu or Phe or Absent or Asn
  misc_feature (174)..(174): Absent or Tyr or Cys or Leu or Met or Pro or Gly
  misc_feature (175)..(175): Absent or Leu or Ser or Arg
  misc_feature (176)..(176): Absent or Arg or Lys or Ile or Thr or Leu or Ala
  misc_feature (177)..(177): Absent or Trp or Val or Phe or Cys
  misc_feature (178)..(178): Absent or Val or Leu or X or Met
  misc_feature (179)..(179): Absent or Tyr or Cys or Trp or Gly
  misc_feature (180)..(180): Absent or Val or Leu or Phe or Met
  misc_feature (181)..(181): Absent or Asp or Glu
  misc_feature (182)..(182): Absent or Gln or His or Lys or Pro
  misc_feature (184)..(184): Absent or Asn or Ser or Thr or Glu or Asp
  misc_feature (185)..(185): Absent or Leu or Val or Ile or Arg or Phe or Lys or Gly or Ala or Ser
  misc_feature (186)..(186): Absent or Cys or Trp or Gly or Ile or Pro or Leu or Ser or Ala
  misc_feature (187)..(187): Absent or Lys or Thr or Ala or Gly or Trp or Ser or Arg
  misc_feature (188)..(188): Absent or Ala or Thr or Met or Val or Gln or Gly
  misc_feature (189)..(189): Absent or Gly or Leu or Thr or Ala
  misc_feature (190)..(190): Absent or Ile or Leu or Phe or Ala or Pro or Gly
  misc_feature (191)..(191): Absent or Ser or Leu or Ala or Val
  misc_feature (192)..(192): Absent or Trp or Ser or Val or Ala or Gly
  misc_feature (193)..(193): Absent or Ser or Ile or Trp
  misc_feature (194)..(194): Absent or Val or Phe or Ile or Leu or Trp
  misc_feature (195)..(195): Absent or Phe or Leu or Ala
  misc_feature (196)..(196): Absent or Phe or Leu or Ala or Val
  misc_feature (197)..(197): Absent or Thr or Leu or Phe
  misc_feature (198)..(198): Absent or Leu or Phe or Val or Ala or Thr
  misc_feature (199)..(199): Absent or Ala or Val or Thr or Leu
  misc_feature (200)..(200): Ile or Tyr or Phe or Val or Absent or Ala or Leu
  misc_feature (201)..(201): Val or Gly or Absent or Ile or Ala
  misc_feature (202)..(202): Val or Ile or Ala or Absent
  misc_feature (203)..(203): Pro or Absent or Val or Ala
  misc_feature (204)..(204): Ala or Ile or Thr or Leu or Absent or Met or Phe or Pro or Val
  misc_feature (205)..(205): Ile or Leu or Val or Absent or Ala or Pro
  misc_feature (206)..(206): Ser or Absent or Asn or Ala
  misc_feature (207)..(207): His or Absent or Leu or Ala
  misc_feature (208)..(208): Phe or Absent or Thr or His or Ala or Val
  misc_feature (209)..(209): Val or Leu or Phe or Absent or Ser or His or Arg or Thr
  misc_feature (210)..(210): Leu or Absent or Ile or Val or Ala or Glu
  misc_feature (211)..(211): Ala or Asp or Leu or Val or Absent or Ile or Ser or Phe
  misc_feature (212)..(212): Cys or Absent or Ala or Thr or Leu or Pro or Gly
  misc_feature (213)..(213): Ser or Pro or Absent or Ala or Phe or Leu or Gly or Thr
  misc_feature (214)..(214): Absent or Thr or Asp or Arg or Ser or Leu or Ala
  misc_feature (215)..(215): Absent or Cys or Pro or Ala
  misc_feature (216)..(216): Absent or Asp or Ser or Val or Leu
  misc_feature (217)..(217): Absent or Ser or Pro or Val
  misc_feature (218)..(218): Thr or Asp or Absent or Ala
  misc_feature (219)..(219): Cys or Absent or Asp
  misc_feature (220)..(220): Asp or Absent or Gly
  misc_feature (221)..(221): Ser or Ala or Arg or Phe or Absent or Thr or Leu or Gly or Pro
  misc_feature (222)..(222): Lys or Asp or His or Absent or Gln or Pro or Gly
  misc_feature (223)..(223): His or Absent or Gly or Arg or Pro or Thr
  misc_feature (224)..(224): Lys or Arg or Ser or Gln or Absent or His
  misc_feature (225)..(225): Arg or Absent or His or Ala or Pro
  misc_feature (226)..(226): Pro or Absent or Tyr or Phe or Arg
  misc_feature (227)..(227): Tyr or Absent or Phe or Asp or Thr
  misc_feature (228)..(228): Asp or His or Absent or Glu or Ser or Thr or Arg or Gly
  misc_feature (229)..(229): Ser or Val or Ile or Ala or Absent or Gly or Glu or Gln
  misc_feature (230)..(230): Val or Pro or Absent or Ile or Leu
  misc_feature (231)..(231): Val or Absent or Gln
  misc_feature (232)..(232): Gln or Absent or Val or Ala
  misc_feature (233)..(233): Leu or Ile or Absent or Val or Phe or Ser
  misc_feature (234)..(234): Ser or Absent or Ala or Leu
  misc_feature (235)..(235): Leu or Absent or Glu or Gly or Thr
  misc_feature (236)..(236): Ser or Absent or Thr or Leu
  misc_feature (237)..(237): Ser or Val or Ile or Leu or Absent or Ala
  misc_feature (238)..(238): Val or Phe or Absent or Met or Leu or Ala
  misc_feature (239)..(239): Ala or Absent or Ser
  misc_feature (240)..(240): Thr or Ala or Ile or Gly or Absent or Leu
  misc_feature (241)..(241): Leu or Val or Ile or Ala or Absent
  misc_feature (242)..(242): Ser or Leu or Absent or Gly or Tyr
  misc_feature (243)..(243): Phe or Leu or Absent or Ala or Thr or Val
  misc_feature (244)..(244): Val or Ile or Leu or Ser or Absent or His or Thr or Lys or Cys
  misc_feature (245)..(245): Cys or Ser or Absent or Leu
  misc_feature (246)..(246): Leu or Ile or Absent or Tyr or Ser or Thr or Arg
  misc_feature (247)..(247): Ser or Absent or Arg or Ala
  misc_feature (248)..(248): Lys or Ser or Tyr or Ile or Asp or Absent or His or Leu
  misc_feature (249)..(249): Phe or Trp or Absent or Ile or Ser or Val or Leu
  misc_feature (250)..(250): Ile or Asp or Ser or Absent or Val or Phe or Arg or Gln or His
  misc_feature (251)..(251): Arg or His or Lys or Absent or Gly
  misc_feature (252)..(252): Lys or Arg or Absent or Ala
  misc_feature (253)..(253): Tyr or Phe or Absent or His or Ile or Val or X or Gly
  misc_feature (255)..(255): Leu or Phe or Met or Ile or Absent
  misc_feature (258)..(258): Phe or Absent or Thr or Leu
  misc_feature (260)..(260): Phe or Absent or Leu or Tyr or His
  misc_feature (261)..(261): Leu or Phe or Absent
  misc_feature (263)..(263): Lys or Absent or Arg or Ser
  misc_feature (264)..(264): Absent or X
  misc_feature (266)..(266): Cys or Ser or Gly or Asp or Trp or Lys or Absent or Ala or Val or Arg
  misc_feature (267)..(267): Asp or Met or Absent or Arg or Thr or Gly or Ser or His
  misc_feature (268)..(268): Glu or Val or Leu or Absent or Asn or Lys or Asp
  misc_feature (270)..(270): Glu or Leu or Asp or Thr or Absent or His or Gln
  misc_feature (271)..(271): Thr or Lys or Arg or Absent or Glu or Asp
  misc_feature (273)..(273): Arg or Gln or Absent
  misc_feature (274)..(274): Lys or Arg or Ile or Absent or Ala or Leu or Ser
  misc_feature (275)..(275): Gly or Glu or Absent or Asn or Ser
  misc_feature (277)..(277): Thr or Ala or Ser or Lys or Glu or Gln or Absent or Ile
  misc_feature (278)..(278): Asp or Ile or Glu or Ala or Val or Absent or Ser
  misc_feature (279)..(279): Gln or Glu or Lys or Absent or Arg
  misc_feature (280)..(280): Leu or Met or Ile or Absent
  misc_feature (281)..(281): Asn or Lys or Gln or Absent or His or Ala or Ser
  misc_feature (282)..(282): Trp or Arg or Gly or Lys or Absent or Ser or Phe
  misc_feature (284)..(284): Leu or Met or Thr or Lys or Absent or Phe
  misc_feature (285)..(285): Lys or Arg or Absent or Ser
  misc_feature (286)..(286): Leu or Arg or Absent or Ser or Val
  misc_feature (288)..(288): Ser or Leu or Met or Cys or Ala or Absent or Gly
  misc_feature (289)..(289): Ile or Leu or Arg or Absent or Ser or Cys
  misc_feature (290)..(290): Phe or Trp or Absent or Ile or Leu
  misc_feature (291)..(291): Val or Gly or Absent or Leu
  misc_feature (292)..(292): Leu or Absent or Ala
  misc_feature (294)..(294): Cys or Ser or Absent
  misc_feature (295)..(295): Phe or Leu or Thr or Absent or Ala or Ile or Cys
  misc_feature (296)..(296): Val or Ile or Thr or Absent or Ala or Phe or Ser
  misc_feature (297)..(297): Ala or Cys or Leu or Absent or Val or X
  misc_feature (298)..(298): Glu or Gln or Absent or Ile or Ala
  misc_feature (299)..(299): Ser or Cys or Ala or Absent or Glu or Asp
  misc_feature (300)..(300): Absent or X or Ile or Ala
  misc_feature (301)..(301): Ala or Val or Gly or Ile or Thr or Absent or His
  misc_feature (303)..(303): Lys or Arg or Absent
  misc_feature (304)..(304): Ile or Absent or Leu or Val or Thr or Ala
  misc_feature (305)..(305): Trp or Absent or Ser or Phe or Tyr
  misc_feature (308)..(308): Ala or Ile or Val or Thr or Absent or Tyr or Lys or Cys or Trp or Leu or His or Arg
  misc_feature (309)..(309): Ser or Thr or Absent or Tyr or Lys or Ala
  misc_feature (310)..(310): Gly or Absent or Val or Ala or Ser or Asn
  misc_feature (311)..(311): Ala or Ser or Phe or Absent or Thr or Gly or Arg or Pro
  misc_feature (312)..(312): Ser or Thr or Asn or Asp or Absent or Val or Pro or Ala
  misc_feature (313)..(313): Gln or Absent or Ser or Arg or Phe or Tyr or Ala
  misc_feature (314)..(314): Ile or Absent or Leu or Val or Pro or Arg or Gly or Tyr
  misc_feature (315)..(315): Pro or Absent or Ser or Gly
  misc_feature (316)..(316): Phe or Tyr or His or Absent or Trp or Gly or Ser
  misc_feature (317)..(317): Leu or Tyr or Phe or Ile or Absent or Ser or Pro
  misc_feature (318)..(318): Gly or Glu or Ile or Absent or Gln or Arg or Ala
  misc_feature (319)..(319): Asn or Glu or Absent or Ser or Arg
  misc_feature (320)..(320): Val or Ile or Lys or Pro or Absent or Asn or His or Gly or Asp or Arg
  misc_feature (321)..(321): Absent or Ala or Gln or Arg
  misc_feature (322)..(322): Absent or Arg
  misc_feature (323)..(323): Absent or Gly or Leu
  misc_feature (324)..(324): Absent or Ser or Asn or Lys
  misc_feature (325)..(325): Ile or Tyr or Val or Leu or Thr or Absent or Pro or Trp
  misc_feature (326)..(326): Leu or Val or Pro or Trp or Ile or Absent or Cys
  misc_feature (327)..(327): Ser or Trp or Arg or Phe or Leu or Gly or Absent
  misc_feature (328)..(328): Asp or Gly or Ser or Asn or His or Arg or Ile or Absent or Ala
  misc_feature (329)..(329): Thr or Ile or Ala or Val or Cys or Ser or Absent
  misc_feature (330)..(330): Val or Ile or Leu or Ser or Absent or Ala
  misc_feature (333)..(333): Ile or Thr or Val or Phe or Ser or Absent or Ala
  misc_feature (334)..(334): Met or Leu or Ala or Ser or Cys or Absent or Val
  misc_feature (335)..(335): Glu or Asp or Gln or Thr or Ser or Gly or Pro or Absent
  misc_feature (336)..(336): Leu or Val or Ile or Ser or Absent or Met or Ala
  misc_feature (337)..(337): Cys or Ser or Ala or Met or Leu or Gln or Absent
  misc_feature (340)..(340): Leu or Phe or Ala or Val or Met or Gly or Absent
  misc_feature (343)..(343): Thr or Ile or Asn or Ser or Absent or Val
  misc_feature (344)..(344): Thr or Ser or Ala or Absent or X or Arg
  misc_feature (345)..(345): Ile or Leu or Absent or Val or Asp or Met
  misc_feature (346)..(346): Ile or Phe or Tyr or Gly or X or Absent
  misc_feature (347)..(347): Phe or Ile or Leu or Arg or Absent or Cys
  misc_feature (348)..(348): Leu or Thr or Ile or Ser or Phe or Arg or Absent or Met
  misc_feature (349)..(349): Val or Ala or Ser or Thr or Arg or Absent or Ile
  misc_feature (351)..(351): Val or Ile or Absent or Met or His
  misc_feature (353)..(353): Phe or Tyr or Absent or Arg
  misc_feature (354)..(354): His or Arg or Absent or Gln or Lys or Asn
  misc_feature (355)..(355): Leu or Absent or Ile or Asn or Thr or Val
  misc_feature (358)..(358): His or Tyr or Absent or Glu or Asn or Ser or Phe
  misc_feature (361)..(361): Ile or Absent or Thr or Val or Ala or Gly
  misc_feature (364)..(364): Leu or Absent or Phe or Gly or Met
  misc_feature (365)..(365): Gln or Asp or Glu or Absent or Asn or Lys or Gly or Thr or Val
  misc_feature (366)..(366): Asp or Glu or Absent or Gly or Ala
  misc_feature (369)..(369): Gln or Pro or Arg or Absent or His or Lys or Ser or Gly
  misc_feature (370)..(370): Absent or Gly or Ser or Thr
  misc_feature (371)..(371): Absent or Val or Leu
  misc_feature (372)..(372): Absent or Val or Leu
  misc_feature (373)..(373): Absent or Leu or Val or Glu
  misc_feature (374)..(374): Absent or Arg or Glu
  misc_feature (375)..(375): Absent or Met or Val or Leu or Arg
  misc_feature (376)..(376): Val or Absent or Cys or Phe or Leu or His or Glu or Asp
  misc_feature (377)..(377): Phe or Absent or Asp or Glu or Leu
  misc_feature (378)..(378): Gln or Absent or Ala or Val or Thr or Gly or Cys
  misc_feature (379)..(379): Val or Arg or Met or Absent or Ser or Glu or Asp or Thr
  misc_feature (380)..(380): Asp or Glu or Absent or Ala or Ser or Pro or Gln or Arg
  misc_feature (381)..(381): Ser or Thr or Absent or Ile or Cys or Arg or Phe
  misc_feature (382)..(382): Absent or Thr or Lys or Ala or Arg or Met
  misc_feature (383)..(383): Asp or Glu or Absent or Ala or Asn or Gly
  misc_feature (385)..(385): Glu or Gly or Absent or Arg or Ser or Asp or Leu or Ala
  misc_feature (386)..(386): Ser or Thr or Absent or Ala or Glu or Val or Ile or Leu or Arg or Asp
  misc_feature (387)..(387): Val or Ile or Absent or Ala or Tyr or Pro
  misc_feature (389)..(389): Ser or Leu or Lys or Absent or Ala or Gly or Val or Arg or Glu or Gln
  misc_feature (390)..(390): Glu or Absent or Ser or Gln or His
  misc_feature (392)..(392): Leu or Absent or Gln or Arg or Met
  misc_feature (393)..(393): Arg or Absent or Lys or Gln or Gly or Asp
  misc_feature (396)..(396): Absent or Gly
  misc_feature (397)..(397): Absent or Arg
  misc_feature (398)..(398): Arg or Absent or Thr or His or Ser or Lys or Val or Glu or Asp
  misc_feature (399)..(399): His or Asn or Absent or Glu or Gln or Ser
  misc_feature (401)..(401): Arg or Absent or Lys or Leu or Ser or Thr or Gln or His
  misc_feature (402)..(402): Ile or Val or Absent or Ala or Lys or Leu or Arg
  misc_feature (403)..(403): Ile or Absent or Val or Thr or Arg
  misc_feature (407)..(407): Tyr or Phe or Absent or Gly
  misc_feature (409)..(409): Ala or Gly or Arg or Absent or Val or Met or Ser or Lys
  misc_feature (412)..(412): Leu or Absent or Ile or Val or Pro
  misc_feature (413)..(413): Trp or Ser or Ala or Leu or Absent or Cys or Arg or Tyr
  misc_feature (414)..(414): Ala or Ser or Absent or Cys or Leu
  misc_feature (416)..(416): Ile or Leu or Val or Absent or Phe or Thr
  misc_feature (417)..(417): Leu or Absent or Phe or Thr or Ser or Ile or Pro
  misc_feature (418)..(418): Ala or Val or Absent or Ile or Gly
  misc_feature (421)..(421): Ser or Absent or Thr
  misc_feature (424)..(424): Ala or Ile or Absent or Met or Gly or Cys or Trp or Thr or Ser
  misc_feature (425)..(425): Ser or Phe or Absent or Ala or Ile
  misc_feature (428)..(428): Ile or Met or Val or Absent or Thr or Lys or Leu or Ala
  misc_feature (429)..(429): Thr or Val or Absent or Ala or Leu
  misc_feature (430)..(430): Thr or Ile or Absent or Leu
  misc_feature (432)..(432): Ser or Pro or Absent or Ala or Tyr or Thr or His or Arg
  misc_feature (433)..(433): Gly or His or Tyr or Thr or Absent or Ser or Gln or Asn or Asp
  misc_feature (434)..(434): Ala or Absent or Val or Asp or Gly or Glu or Ser
  misc_feature (435)..(435): Val or Asp or Asn or Absent or Ala or Pro or Gly or Lys or Ile or Gln or Arg
  misc_feature (436)..(436): Val or Asn or Absent or Phe or Lys or Ile or Asp
  misc_feature (437)..(437): Asp or Asn or Absent or Ser
  misc_feature (438)..(438): Val or Ile or Absent or Phe or Leu
  misc_feature (439)..(439): Tyr or Leu or Phe or Absent or Ala or Thr
  misc_feature (440)..(440): Arg or Lys or Glu or Absent or Asn or Gln or His or Thr
  misc_feature (441)..(441): Ala or Gly or Absent or Val or Ser or Cys or Thr
  misc_feature (449)..(449): Ile or Absent or Leu or Thr or Pro or Val or Met
  misc_feature (450)..(450): Thr or Asn or Absent or Ile or Ser or Val or Gly
  misc_feature (452)..(452): Val or Absent or Leu or Met
  misc_feature (453)..(453): Thr or Ser or Absent or Val or Ala
  misc_feature (456)..(456): Leu or Tyr or Phe or Absent or Val or Met or Ile
  misc_feature (457)..(457): Ile or Absent or Met or Leu or Val
  misc_feature (458)..(458): Ile or Leu or Cys or Absent
  misc_feature (460)..(460): Absent or X
  misc_feature (461)..(461): Arg or Absent or Lys or Leu or His or Gly or Asn or Ser or Gln or Tyr
  misc_feature (464)..(464): Thr or Absent or Val or Ser or Ala
  misc_feature (469)..(469): Lys or Absent or Arg or Gln or X
  misc_feature (470)..(470): Ala or Absent or Leu or Thr
  misc_feature (472)..(472): Ser or Absent or Arg or Asn or Ala
  misc_feature (473)..(473): Val or Leu or Ile or Absent or His or Pro or Met
  misc_feature (475)..(475): Ser or Gly or Absent or Ala
  misc_feature (476)..(476): Leu or Absent or Ile or Phe or Gln or Pro or His or Val
  misc_feature (477)..(477): Ala or Absent or Met or Val or Thr or Asp
  misc_feature (478)..(478): Ala or Ser or Absent or Thr or Gly or Asn
  misc_feature (479)..(479): Lys or Absent or Arg or Gln or Ala or Gly
  misc_feature (481)..(481): His or Absent or Asn or Leu or X
  misc_feature (482)..(482): Ile or Val or Absent or Ala
  misc_feature (483)..(483): Cys or Absent or Tyr or Leu or Asp
  misc_feature (484)..(484): Ala or Absent or Gly or Cys
  misc_feature (485)..(485): Thr or Absent or Ser
  misc_feature (486)..(486): Leu or Ile or Absent or Val or Cys or X
  misc_feature (487)..(487): Asp or Asn or Absent or Thr or Ile or Ser or Val
  misc_feature (488)..(488): Thr or Ser or Absent or Gly or Pro or Glu or Asn or His
  misc_feature (489)..(489): Phe or Tyr or Absent or Leu or His or Pro or Arg or Ser or Ala
  misc_feature (490)..(490): Asp or Absent or Ala or Val or Ser or Leu or Gln or Phe
  misc_feature (491)..(491): Ser or Asn or Asp or Absent or His or Val or Pro or Gly or Leu or Glu
  misc_feature (492)..(492): Thr or Ile or Met or Absent or Leu or Asp or Arg or Glu or Asn
  misc_feature (493)..(493): Glu or Asp or Absent or Tyr or Gln
  misc_feature (494)..(494): Gly or Absent or Asp or Ser or Glu or Ile or Gln or His
  misc_feature (495)..(495): Absent or Gly or Leu or Gln or Ile or Asp or Ala or Glu
  misc_feature (496)..(496): Absent or Glu or Lys or Arg or Asn or Asp
  misc_feature (497)..(497): Absent or Thr or Pro or Val
  misc_feature (498)..(498): Absent or Glu or Pro or Asp or Gly or Asn or Arg
  misc_feature (499)..(499): Glu or Absent or Thr or Lys or Gly or Ser or Gln or Pro
  misc_feature (500)..(500): Thr or Absent or Pro or Cys or Gly or Asn or Asp
  misc_feature (501)..(501): Pro or Absent or Thr or Asp or Gln or His or Ser or Ile or Leu
  misc_feature (502)..(502): Arg or Absent or Thr or Gly or Ser or Asn or Ala or Lys or Pro
  misc_feature (503)..(503): Thr or Asn or Absent or Ser or Gly or Ala or Arg or Pro
  misc_feature (504)..(504): Pro or Ala or Gln or Absent or Ile or Thr or Asp or Met or Lys or Cys or Ser
  misc_feature (505)..(505): Thr or Leu or Asn or Ser or Absent or Ile or Gln or Pro or Tyr or Val or Ala
  misc_feature (506)..(506): Ala or Ile or Absent or Glu or His or Pro or Asp or Gln or Tyr or Gly
  misc_feature (507)..(507): Asn or Ala or Ile or Ser or Absent or Tyr
  misc_feature (508)..(508): Absent or Ser or Ile or Gln or Leu or Tyr
  misc_feature (509)..(509): Absent or Ala or Arg or Val or Ile or Gln or Leu or His
  misc_feature (510)..(510): Absent or Gln or Ser or Leu or Tyr or Trp or Thr or Ala or Val
  misc_feature (511)..(511): Absent or Ser or Gln or Ala or Pro
  misc_feature (512)..(512): Absent or Ser or Ala or Gly or Val
  misc_feature (513)..(513): Absent or Ala or Thr or Pro or Asn
  misc_feature (514)..(514): Absent or Met or Ile or Thr or Val or Ala
  misc_feature (515)..(515): Absent or Arg or Ser or Val or Tyr
  misc_feature (516)..(516): Absent or Gly or Pro or Trp or Arg
  misc_feature (517)..(517): Absent or Pro or Phe or Gln or Met or Val
  misc_feature (518)..(518): Absent or Ala or Val or Leu or Ser or Pro
  misc_feature (519)..(519): Absent or Met or Ile or Phe or Arg or His or Ala or Ser
  misc_feature (520)..(520): Absent or Ala or Pro or Gly or Arg or Glu or Gln or Val
  misc_feature (521)..(521): Absent or Ala or Ile or Asn or Arg or Cys or Tyr or Thr or Glu or Gly or Asp
  misc_feature (522)..(522): Gly or Asp or Asn or Absent or Ala or Leu or Val or Pro or Lys or Ser or Glu
  misc_feature (523)..(523): Ile or Absent or Val or Tyr or Glu or His or Ser
  misc_feature (524)..(524): Thr or Ser or Asp or Absent or Glu or Val or Asn or Cys or Gly
  misc_feature (525)..(525): Asp or Trp or Absent or Thr or Gln or Glu or Ser
  misc_feature (526)..(526): Asp or Gly or Val or Absent or Ser or Thr
  misc_feature (527)..(527): Glu or Ser or Leu or Absent or Asp or Gly
  misc_feature (528)..(528): Glu or Ser or Asp or Absent or Cys or Gln or Thr or Gly
  misc_feature (529)..(529): Gly or Glu or Asp or Absent or Ser
  misc_feature (530)..(530): Asp or Absent or Glu or Val or Ser or Tyr
  misc_feature (531)..(531): Asp or Glu or Absent or Gly or Ser or Lys
  misc_feature (532)..(532): Ala or Ser or Val or Asp or Absent or Glu or Gln
  misc_feature (533)..(533): Gly or Asp or Absent or Ser or Glu or Thr
  misc_feature (534)..(534): Asp or Gly or Absent or Glu or Thr or Trp or Ser or Arg
  misc_feature (535)..(535): Glu or Asp or Absent or Gly or Arg or Pro or Ser
  misc_feature (536)..(536): Glu or Asp or Absent or Tyr or Gly or Ser
  misc_feature (537)..(537): Asp or Absent or Leu or Gln or Glu or Pro or Cys
  misc_feature (538)..(538): Glu or Absent or Ser or Asp or Gly
  misc_feature (539)..(539): Leu or Absent or Pro or Met or Ser or Gly
  misc_feature (540)..(540): Asp or Asn or Absent or Arg or Leu or Val or His
  misc_feature (541)..(541): Asn or Pro or Absent or Asp or Tyr or His or Glu
  misc_feature (542)..(542): Ser or Thr or Asp or Absent or Asn or Gly or Lys
  misc_feature (543)..(543): Lys or Ser or Absent or Thr or Leu or Pro
  misc_feature (544)..(544): Leu or Absent or Ser or Lys or Glu or Asp or Arg
  misc_feature (545)..(545): Ile or Met or Leu or Thr or Absent or Val or Phe or Tyr
  misc_feature (546)..(546): Pro or Met or Leu or Lys or Absent or His or Asp or Thr or Val or Ile
  misc_feature (547)..(547): Ala or Pro or Leu or Absent or Gln or Met or Ser
  misc_feature (548)..(548): Tyr or Ile or Ala or Absent or Thr or Pro or Phe
  misc_feature (549)..(549): Ala or Gln or Tyr or Phe or Absent or Ile or His
  misc_feature (550)..(550): Tyr or Thr or Ser or Absent or Ala or His or Asn
  misc_feature (551)..(551): Ser or Arg or Gln or Ala or Absent or Asn or Asp or His or Thr
  misc_feature (552)..(552): Thr or Arg or Absent or Ala or Met or Val or Asn or His
  misc_feature (553)..(553): Ile or Val or Absent or Glu or His
  misc_feature (555)..(555): Phe or Ile or Absent or Tyr or Ser
  misc_feature (556)..(556): Gln or His or Pro or Absent
  misc_feature (563)..(563): Asn or Thr or Absent or Cys or Lys
  misc_feature (569)..(569): Arg or Absent or Lys or Tyr
  misc_feature (575)..(575): Tyr or Phe or Absent
  misc_feature (577)..(577): Phe or Absent or Val or Cys or X
  misc_feature (578)..(578): Thr or Met or Absent or Leu or Val
  misc_feature (579)..(579): Leu or Absent or Val
  misc_feature (581)..(581): Arg or Absent or Lys
  misc_feature (582)..(582): Ser or Thr or Absent or Gly or Ala
  misc_feature (583)..(583): Thr or Trp or Absent or Phe or Tyr
  misc_feature (585)..(585): His or Absent or Asn or Arg or Tyr
  misc_feature (586)..(586): Ser or Absent or Thr or Met or Gly or Ala
  misc_feature (587)..(587): Ile or Absent or Leu or X
  misc_feature (589)..(589): Gly or Absent or Ser or Ala or Met
  misc_feature (590)..(590): Val or Ile or Absent or Cys or Leu
  misc_feature (591)..(591): Glu or Gln or Absent or Thr
  misc_feature (592)..(592): Leu or Absent or Phe or Trp or X
  misc_feature (593)..(593): Ala or Absent or Ser or Thr
  misc_feature (595)..(595): Val or Cys or Absent or Leu or Thr or Ile or Phe
  misc_feature (596)..(596): Leu or Absent or Met
  misc_feature (600)..(600): Gly or Asn or Absent or Lys
  misc_feature (603)..(603): Val or Absent or Ile
  misc_feature (604)..(604): Gly or Absent or Val or Met or Ser or Ile
  misc_feature (605)..(605): Ile or Val or Absent or Asn or Thr or Phe
  misc_feature (606)..(606): Ser or Absent or Ile or Leu or Phe
  misc_feature (607)..(607): Absent or Pro or Ala or Thr or Ile or Tyr
  misc_feature (608)..(608): Absent or Cys or Arg
  misc_feature (609)..(609): Absent or Phe or Ser
  misc_feature (610)..(610): Absent or Tyr or Ser
  misc_feature (611)..(611): Absent or Ser or Gln
  misc_feature (612)..(612): Absent or Glu or Lys
  misc_feature (613)..(613): Absent or Ser or Gly
  misc_feature (614)..(614): Absent or Ile or Thr
  misc_feature (615)..(615): Absent or Phe or Gly
  misc_feature (616)..(616): Absent or Ser or Glu
  misc_feature (617)..(617): Absent or Phe or Glu
  misc_feature (618)..(618): Absent or Phe or Leu
  misc_feature (619)..(619): Absent or Ile or Ala
  misc_feature (620)..(620): Absent or Thr or Gly
  misc_feature (621)..(621): Absent or Phe or Ala
  misc_feature (622)..(622): Absent or Leu or Pro
  misc_feature (623)..(623): Absent or Leu
  misc_feature (624)..(624): Absent or Pro
  misc_feature (625)..(625): Absent or Pro
  misc_feature (626)..(626): Absent or Leu
  misc_feature (627)..(627): Absent or Cys
  misc_feature (628)..(628): Absent or Leu
  misc_feature (629)..(629): Absent or Arg
  misc_feature (630)..(630): Absent or Ala
  misc_feature (631)..(631): Absent or Leu
  misc_feature (632)..(632): Absent or Ile
  misc_feature (633)..(633): Absent or Lys
  misc_feature (634)..(634): Absent or Gly
  misc_feature (635)..(635): Absent or Leu
  misc_feature (636)..(636): Absent or Val
  misc_feature (637)..(637): Absent or Ala
  misc_feature (638)..(638): Absent or Asp
  misc_feature (639)..(639): Absent or His
  misc_feature (640)..(640): Absent or Gly
  misc_feature (641)..(641): Absent or Glu
  misc_feature (642)..(642): Absent or Ala
  misc_feature (643)..(643): Absent or Ala
  misc_feature (644)..(644): Absent or Pro
  misc_feature (645)..(645): Absent or Ala
  misc_feature (646)..(646): Absent or Val
  misc_feature (647)..(647): Absent or Tyr
  misc_feature (648)..(648): Absent or Ala
  misc_feature (649)..(649): Absent or His
  misc_feature (650)..(650): Absent or Thr
  misc_feature (651)..(651): Absent or Ala
  misc_feature (652)..(652): Absent or Lys
  misc_feature (653)..(653): Absent or Leu
  misc_feature (654)..(654): Absent or Gly
  misc_feature (655)..(655): Absent or Leu
  misc_feature (656)..(656): Absent or Asp
  misc_feature (657)..(657): Absent or His
  misc_feature (658)..(658): Absent or Arg
  misc_feature (659)..(659): Absent or Leu
  misc_feature (660)..(660): Absent or Ala
  misc_feature (661)..(661): Absent or Val
  misc_feature (662)..(662): Absent or Arg
  misc_feature (663)..(663): Absent or Asp
  misc_feature (664)..(664): Absent or Gly
  misc_feature (665)..(665): Absent or Leu
  misc_feature (666)..(666): Absent or Val
  misc_feature (667)..(667): Absent or Glu
  misc_feature (668)..(668): Absent or Leu
  misc_feature (669)..(669): Absent or Tyr
  misc_feature (670)..(670): Absent or Leu
  misc_feature (671)..(671): Absent or Ala
  misc_feature (672)..(672): Absent or Arg
  misc_feature (673)..(673): Absent or Val
  misc_feature (674)..(674): Absent or Glu
  misc_feature (675)..(675): Absent or Leu
  misc_feature (676)..(676): Absent or Ala
  misc_feature (677)..(677): Absent or Ser
  misc_feature (678)..(678): Absent or Ala
  misc_feature (679)..(679): Absent or Trp
  misc_feature (680)..(680): Absent or Ala
  misc_feature (681)..(681): Absent or Leu
  misc_feature (682)..(682): Absent or Phe
  misc_feature (683)..(683): Absent or Asp
  misc_feature (684)..(684): Absent or Gly
  misc_feature (685)..(685): Absent or Phe
  misc_feature (686)..(686): Absent or Pro
  misc_feature (687)..(687): Absent or Ala
  misc_feature (688)..(688): Absent or Gly
  misc_feature (689)..(689): Absent or Trp
  misc_feature (690)..(690): Absent or Pro
  misc_feature (691)..(691): Absent or Gly
  misc_feature (692)..(692): Absent or Arg
  misc_feature (693)..(693): Absent or Arg
  misc_feature (694)..(694): Absent or Phe
  misc_feature (695)..(695): Absent or Leu
  misc_feature (696)..(696): Absent or Arg
  misc_feature (697)..(697): Absent or Met
  misc_feature (698)..(698): Absent or Pro
  misc_feature (699)..(699): Absent or Val
  misc_feature (700)..(700): Absent or Lys
  misc_feature (701)..(701): Absent or Lys
  misc_feature (702)..(702): Absent or Asn
  misc_feature (703)..(703): Absent or Val
  misc_feature (704)..(704): Absent or Leu
  misc_feature (705)..(705): Absent or Val
  misc_feature (706)..(706): Absent or Pro
  misc_feature (707)..(707): Absent or Ala
  misc_feature (708)..(708): Absent or Ala
  misc_feature (709)..(709): Absent or Ala
  misc_feature (710)..(710): Absent or Ala
  misc_feature (711)..(711): Absent or Thr
  misc_feature (712)..(712): Absent or Ser
  misc_feature (713)..(713): Absent or Arg
  misc_feature (714)..(714): Absent or Pro
  misc_feature (715)..(715): Absent or Ala
  misc_feature (716)..(716): Absent or Val
  misc_feature (717)..(717): Absent or Gly
  misc_feature (718)..(718): Absent or Pro
  misc_feature (719)..(719): Absent or Pro
  misc_feature (720)..(720): Absent or Arg
  misc_feature (721)..(721): Absent or Pro
  misc_feature (722)..(722): Absent or Gly
  misc_feature (723)..(723): Absent or Asn
  misc_feature (724)..(724): Absent or Asp
  misc_feature (725)..(725): Absent or His
  misc_feature (726)..(726): Absent or Pro
  misc_feature (727)..(727): Absent or Thr
  misc_feature (728)..(728): Absent or Ala
  misc_feature (729)..(729): Absent or Gly
  misc_feature (730)..(730): Absent or Arg
  misc_feature (731)..(731): Absent or Pro
  misc_feature (732)..(732): Absent or Ala
  misc_feature (733)..(733): Absent or Gln
  misc_feature (734)..(734): Absent or Ser
  misc_feature (735)..(735): Absent or Arg
  misc_feature (736)..(736): Absent or Glu
  misc_feature (737)..(737): Absent or Lys
  misc_feature (738)..(738): Absent or Thr
  misc_feature (739)..(739): Absent or Ile
  misc_feature (740)..(740): Absent or Leu
  misc_feature (741)..(741): Absent or Ile
  misc_feature (742)..(742): Absent or Pro
  misc_feature (743)..(743): Absent or Pro
  misc_feature (744)..(744): Absent or Gln
  misc_feature (745)..(745): Absent or Val
  misc_feature (746)..(746): Absent or Ser
  misc_feature (747)..(747): Absent or Ser
  misc_feature (748)..(748): Absent or Pro
  misc_feature (749)..(749): Absent or Ile
  misc_feature (750)..(750): Absent or Gly
  misc_feature (751)..(751): Absent or Tyr
  misc_feature (752)..(752): Absent or Arg
  misc_feature (753)..(753): Absent or Arg
  misc_feature (754)..(754): Absent or Cys
  misc_feature (755)..(755): Absent or His
  misc_feature (756)..(756): Absent or Leu
  misc_feature (757)..(757): Absent or Pro
  misc_feature (758)..(758): Absent or Ala
  misc_feature (759)..(759): Absent or Ala
  misc_feature (760)..(760): Absent or Ala
  misc_feature (761)..(761): Absent or Ala
  misc_feature (762)..(762): Absent or Ile
  misc_feature (763)..(763): Absent or Asn
  misc_feature (764)..(764): Absent or Asn
  misc_feature (765)..(765): Absent or His
  misc_feature (766)..(766): Absent or Gly
  misc_feature (767)..(767): Absent or Asp
  misc_feature (768)..(768): Absent or Gln
  misc_feature (769)..(769): Absent or Gln
  misc_feature (770)..(770): Absent or Lys
  misc_feature (771)..(771): Absent or Arg
  misc_feature (772)..(772): Absent or Gly
  misc_feature (773)..(773): Absent or Leu
  misc_feature (774)..(774): Absent or Leu
  misc_feature (775)..(775): Absent or Glu
  misc_feature (776)..(776): Absent or Leu
  misc_feature (777)..(777): Absent or Tyr
  misc_feature (778)..(778): Absent or Gln
  misc_feature (779)..(779): Absent or Thr
  misc_feature (780)..(780): Absent or Gly
  misc_feature (781)..(781): Absent or Pro
  misc_feature (782)..(782): Absent or Ile
  misc_feature (783)..(783): Absent or Trp
  misc_feature (784)..(784): Absent or Ala
  misc_feature (785)..(785): Absent or Lys
  misc_feature (786)..(786): Absent or Ser
  misc_feature (787)..(787): Absent or Pro
  misc_feature (788)..(788): Absent or Ala
  misc_feature (789)..(789): Absent or Ile
  misc_feature (790)..(790): Absent or Thr
  misc_feature (791)..(791): Absent or Lys
  misc_feature (792)..(792): Absent or Thr
  misc_feature (793)..(793): Absent or Trp
  misc_feature (794)..(794): Absent or Ala
  misc_feature (795)..(795): Absent or Glu
  misc_feature (796)..(796): Absent or Met
  misc_feature (797)..(797): Absent or Trp
  misc_feature (798)..(798): Absent or Pro
  misc_feature (799)..(799): Absent or Ile
  misc_feature (800)..(800): Absent or Asn
  misc_feature (801)..(801): Absent or Thr
  misc_feature (802)..(802): Absent or Thr
  misc_feature (803)..(803): Absent or Thr
  misc_feature (804)..(804): Absent or Asp
  misc_feature (805)..(805): Absent or Ser
  misc_feature (806)..(806): Absent or Ala
  misc_feature (807)..(807): Absent or Ala
  misc_feature (808)..(808): Absent or Ala
  misc_feature (809)..(809): Absent or Pro
  misc_feature (810)..(810): Absent or Ala
  misc_feature (811)..(811): Absent or Thr
  misc_feature (812)..(812): Absent or Ala
  misc_feature (813)..(813): Absent or Thr
  misc_feature (814)..(814): Absent or Ser
  misc_feature (815)..(815): Absent or Leu
  misc_feature (816)..(816): Absent or Ala
  misc_feature (817)..(817): Absent or Ala
  misc_feature (818)..(818): Absent or Ala
  misc_feature (819)..(819): Absent or Ser
  misc_feature (820)..(820): Absent or Pro
  misc_feature (821)..(821): Absent or Pro
  misc_feature (822)..(822): Absent or Ser
  misc_feature (823)..(823): Absent or Ser
  misc_feature (824)..(824): Absent or Leu
  misc_feature (825)..(825): Absent or Leu
  misc_feature (826)..(826): Absent or Ala
  misc_feature (827)..(827): Absent or Ser
  misc_feature (828)..(828): Absent or Gln
  misc_feature (829)..(829): Absent or Arg
  misc_feature (830)..(830): Absent or Ser
  misc_feature (831)..(831): Absent or Ser
  misc_feature (832)..(832): Absent or Pro
  misc_feature (833)..(833): Absent or Pro
  misc_feature (834)..(834): Absent or Trp
  misc_feature (835)..(835): Absent or Glu
  misc_feature (836)..(836): Absent or Ala
  misc_feature (837)..(837): Absent or Val
  misc_feature (838)..(838): Absent or Ala
  misc_feature (839)..(839): Absent or Gly
  misc_feature (840)..(840): Absent or Gly
  misc_feature (841)..(841): Absent or Ser
  misc_feature (842)..(842): Absent or Gly
  misc_feature (843)..(843): Absent or Ser
  misc_feature (844)..(844): Absent or Gly
  misc_feature (845)..(845): Absent or Arg
  misc_feature (846)..(846): Absent or Pro
  misc_feature (847)..(847): Absent or Ser
  misc_feature (848)..(848): Absent or Pro
  misc_feature (849)..(849): Absent or Pro
  misc_feature (850)..(850): Absent or Gln
  misc_feature (851)..(851): Absent or Pro
  misc_feature (852)..(852): Absent or Pro
  misc_feature (853)..(853): Absent or Arg
  misc_feature (854)..(854): Absent or His
  misc_feature (855)..(855): Absent or Arg
  misc_feature (856)..(856): Absent or Gly
  misc_feature (857)..(857): Absent or Ser
  misc_feature (858)..(858): Absent or Pro
  misc_feature (859)..(859): Absent or Gly
  misc_feature (860)..(860): Absent or Gly
  misc_feature (861)..(861): Absent or Thr
  misc_feature (862)..(862): Absent or Pro
  misc_feature (863)..(863): Absent or Gly
  misc_feature (864)..(864): Absent or Leu
  misc_feature (865)..(865): Absent or His
  misc_feature (866)..(866): Absent or Gly
  misc_feature (867)..(867): Absent or Leu
  misc_feature (868)..(868): Absent or Pro
  misc_feature (869)..(869): Absent or Met
  misc_feature (870)..(870): Absent or Glu
  misc_feature (871)..(871): Absent or Met
  misc_feature (872)..(872): Absent or Thr
  misc_feature (873)..(873): Absent or Thr
  misc_feature (874)..(874): Absent or Gly
  misc_feature (875)..(875): Absent or Glu
  misc_feature (876)..(876): Absent or Met
  misc_feature (877)..(877): Absent or Glu
  misc_feature (878)..(878): Absent or Ala
  misc_feature (879)..(879): Absent or Ala
  misc_feature (880)..(880): Absent or Ile
  misc_feature (881)..(881): Absent or Val
  misc_feature (882)..(882): Absent or Ala
  misc_feature (883)..(883): Absent or Leu
  misc_feature (884)..(884): Absent or Pro
  misc_feature (885)..(885): Absent or Ala
  misc_feature (886)..(886): Absent or Lys
  misc_feature (887)..(887): Absent or Lys
  misc_feature (888)..(888): Absent or Glu
  misc_feature (889)..(889): Absent or Ala
  misc_feature (890)..(890): Absent or Leu
  misc_feature (891)..(891): Absent or Arg
  misc_feature (892)..(892): Absent or Glu
  misc_feature (893)..(893): Absent or Ala
  misc_feature (894)..(894): Absent or Pro
  misc_feature (895)..(895): Absent or Ser
  misc_feature (896)..(896): Absent or Ser
  misc_feature (897)..(897): Absent or Ser
  misc_feature (898)..(898): Absent or Pro
  misc_feature (899)..(899): Absent or Arg
  misc_feature (900)..(900): Absent or Arg
  misc_feature (901)..(901): Absent or Leu
  misc_feature (902)..(902): Absent or Pro
  misc_feature (903)..(903): Absent or Leu
  misc_feature (904)..(904): Absent or Gln
  misc_feature (905)..(905): Absent or Ala
  misc_feature (906)..(906): Absent or Leu
  misc_feature (907)..(907): Absent or Pro
  misc_feature (908)..(908): Absent or Pro
  misc_feature (909)..(909): Absent or Leu
  misc_feature (910)..(910): Absent or Ser
  misc_feature (911)..(911): Absent or Arg
  misc_feature (912)..(912): Absent or Leu
  misc_feature (913)..(913): Absent or Asp
  unsure (1)..(913): unsure at all Xaa locations
XXXXXXXXXXXXXXXXXXXXXXXXXXXXXXXXXXXXXXXXXXXXXXXXXXXXXXXXXXXXXXXXXXXXXXXXXXXXXXXXXXXXXXXXXXXXXXXXXXXXXXXXXXXXXXXXXXXXXXXXXXXXXXXXXXXXXXXXXXXXXXXXXXXXXXXXXXXXXXXXXXXXXXXXXXXXXXXXXXXXXXSXXXXXXXXXXXXXXXXXXXXXXXXXXXXXXXXXXXXXXXXXXXXXXXXXXXXXXXXXXXXXXXXXXXXXXGXRRXLXXDXXLXXXSXXVXXXYXXXXXXSXXXLXXXXXPXXXXXXXXYXXXWYXXXXXXXXXXXXXXXXXXXXXXXACXXXXXSWXYRXXXXXXXCXLXXXICXLQXLRXXXFAXXXXXXXXXXXXXXXVXXXLXXHXXIRXXXXLXXXSHRXRXFIXXXLXXXTAXQFXXLLXXXRXXXXXXXXXXGELALCSXXLXXGLXXXLXXSAXKITHXXQXXTXXXXXWXXXXXXXXXXXXXXXXXXXXXXXXXXXXXXXXXXXXXXXXXXXXXXXXXXXXXXXXXXXXXXXXXXXXXXXXXSXXKRQALVXYLENNXAGITVXGXXXDXXXLXXXFXXXXXLXXWLLXKTXXXXXXXXXXXXXXXXXXXXXXXXXXXXXXXXXXXXXXXXXXXXXXXXXXXXXXXXXXXXXXXXXXXXXXXXXXXXXXXXXXXXXXXXXXXXXXXXXXXXXXXXXXXXXXXXXXXXXXXXXXXXXXXXXXXXXXXXXXXXXXXXXXXXXXXXXXXXXXXXXXXXXXXXXXXXXXXXXXXXXXXXXXXXXXXXXXXXXXXXXXXXXXXXXXXXXXXXXXXXXXXXXXXXXXXXXXXXXXXXXXXXXXXXXXXXXXXXXXXXXXXXXXXXXXXXXXXXXXXXXXXXXXXXXXXXXXXXXXXXXXXXXXXXXXX

SEQ ID NO: 36477 - protein, 396 aa, Artificial sequence
  consensus sequence of seq id no: 610 and its homologs
  misc_feature (1)..(1): Absent or Met
  misc_feature (2)..(2): Absent or Glu
  misc_feature (3)..(3): Absent or Cys
  misc_feature (4)..(4): Absent or Cys
  misc_feature (5)..(5): Absent or Lys
  misc_feature (6)..(6): Absent or Arg
  misc_feature (7)..(7): Absent or Val
  misc_feature (8)..(8): Absent or Tyr
  misc_feature (9)..(9): Absent or Glu
  misc_feature (10)..(10): Absent or Trp
  misc_feature (11)..(11): Absent or Leu
  misc_feature (12)..(12): Absent or Cys
  misc_feature (13)..(13): Absent or Asn
  misc_feature (14)..(14): Absent or Ser
  misc_feature (15)..(15): Absent or Lys
  misc_feature (16)..(16): Absent or Ser
  misc_feature (17)..(17): Absent or Tyr
  misc_feature (18)..(18): Absent or Leu
  misc_feature (19)..(19): Absent or Ile
  misc_feature (20)..(20): Absent or Ile
  misc_feature (21)..(21): Absent or Leu
  misc_feature (22)..(22): Absent or Ser
  misc_feature (23)..(23): Absent or Leu
  misc_feature (24)..(24): Absent or Gln
  misc_feature (25)..(25): Absent or Phe
  misc_feature (26)..(26): Absent or Gly
  misc_feature (27)..(27): Absent or Ser
  misc_feature (28)..(28): Absent or Ala
  misc_feature (29)..(29): Absent or Gly
  misc_feature (30)..(30): Absent or Met
  misc_feature (31)..(31): Absent or Tyr
  misc_feature (32)..(32): Absent or Leu
  misc_feature (33)..(33): Absent or Ile
  misc_feature (34)..(34): Absent or Thr
  misc_feature (35)..(35): Absent or Met
  misc_feature (36)..(36): Absent or Asp
  misc_feature (37)..(37): Absent or Ala
  misc_feature (38)..(38): Absent or Leu
  misc_feature (39)..(39): Absent or Asn
  misc_feature (40)..(40): Absent or Lys
  misc_feature (41)..(41): Absent or Gly
  misc_feature (42)..(42): Absent or Met
  misc_feature (43)..(43): Absent or Ser
  misc_feature (44)..(44): Absent or His
  misc_feature (45)..(45): Absent or Tyr
  misc_feature (46)..(46): Absent or Val
  misc_feature (47)..(47): Absent or Phe
  misc_feature (48)..(48): Absent or Val
  misc_feature (49)..(49): Absent or Val
  misc_feature (50)..(50): Absent or Tyr
  misc_feature (51)..(51): Absent or Arg
  misc_feature (52)..(52): Absent or Asn
  misc_feature (53)..(53): Absent or Val
  misc_feature (54)..(54): Absent or Ile
  misc_feature (55)..(55): Absent or Ala
  misc_feature (56)..(56): Absent or Thr
  misc_feature (57)..(57): Absent or Ile
  misc_feature (58)..(58): Absent or Ala
  misc_feature (59)..(59): Absent or Leu
  misc_feature (60)..(60): Absent or Gly
  misc_feature (61)..(61): Absent or Pro
  misc_feature (62)..(62): Absent or Phe
  misc_feature (63)..(63): Absent or Ala
  misc_feature (64)..(64): Absent or Phe
  misc_feature (65)..(65): Absent or Phe
  misc_feature (66)..(66): Absent or Leu
  misc_feature (67)..(67): Absent or Glu
  misc_feature (68)..(68): Absent or Arg
  misc_feature (69)..(69): Absent or Lys
  misc_feature (70)..(70): Absent or Val
  misc_feature (71)..(71): Absent or Arg
  misc_feature (72)..(72): Absent or Pro
  misc_feature (73)..(73): Absent or Lys
  misc_feature (74)..(74): Absent or Met
  misc_feature (75)..(75): Absent or Thr
  misc_feature (76)..(76): Absent or Val
  misc_feature (77)..(77): Absent or Arg
  misc_feature (78)..(78): Absent or Ile
  misc_feature (79)..(79): Absent or Phe
  misc_feature (80)..(80): Absent or Ser
  misc_feature (81)..(81): Absent or Glu
  misc_feature (82)..(82): Absent or Ile
  misc_feature (83)..(83): Absent or Met
  misc_feature (84)..(84): Absent or Ala
  misc_feature (85)..(85): Absent or Val
  misc_feature (86)..(86): Absent or Ala
  misc_feature (87)..(87): Absent or Phe
  misc_feature (88)..(88): Absent or Val
  misc_feature (89)..(89): Absent or Glu
  misc_feature (90)..(90): Absent or Ile
  misc_feature (91)..(91): Absent or Ile
  misc_feature (92)..(92): Absent or Leu
  misc_feature (93)..(93): Absent or Asp
  misc_feature (94)..(94): Absent or Gln
  misc_feature (95)..(95): Absent or Cys
  misc_feature (96)..(96): Absent or Phe
  misc_feature (97)..(97): Absent or Thr
  misc_feature (98)..(98): Absent or Phe
  misc_feature (99)..(99): Absent or Leu
  misc_feature (100)..(100): Absent or Gly
  misc_feature (101)..(101): Absent or Met
  misc_feature (102)..(102): Absent or Lys
  misc_feature (103)..(103): Absent or Tyr
  misc_feature (104)..(104): Absent or Thr
  misc_feature (105)..(105): Absent or Ser
  misc_feature (106)..(106): Absent or Ala
  misc_feature (107)..(107): Absent or Ser
  misc_feature (108)..(108): Absent or Phe
  misc_feature (109)..(109): Absent or Ala
  misc_feature (110)..(110): Absent or Ser
  misc_feature (111)..(111): Absent or Ala
  misc_feature (112)..(112): Absent or Val
  misc_feature (113)..(113): Absent or Met
  misc_feature (114)..(114): Absent or Asn
  misc_feature (115)..(115): Absent or Ser
  misc_feature (116)..(116): Absent or Val
  misc_feature (117)..(117): Absent or Pro
  misc_feature (118)..(118): Absent or Ser
  misc_feature (119)..(119): Absent or Ile
  misc_feature (120)..(120): Absent or Thr
  misc_feature (121)..(121): Absent or Phe
  misc_feature (122)..(122): Absent or Val
  misc_feature (123)..(123): Absent or Leu
  misc_feature (124)..(124): Absent or Ala
  misc_feature (125)..(125): Absent or Ile
  misc_feature (126)..(126): Absent or Ile
  misc_feature (127)..(127): Absent or Phe
  misc_feature (128)..(128): Absent or Arg
  misc_feature (129)..(129): Absent or Leu
  misc_feature (130)..(130): Absent or Glu
  misc_feature (131)..(131): Absent or Ser
  misc_feature (132)..(132): Absent or Met
  misc_feature (133)..(133): Absent or Asn
  misc_feature (134)..(134): Absent or Leu
  misc_feature (135)..(135): Absent or Lys
  misc_feature (136)..(136): Absent or Glu
  misc_feature (137)..(137): Absent or Leu
  misc_feature (138)..(138): Absent or Gly
  misc_feature (139)..(139): Absent or Cys
  misc_feature (140)..(140): Absent or Leu
  misc_feature (141)..(141): Absent or Ala
  misc_feature (142)..(142): Absent or Lys
  misc_feature (143)..(143): Absent or Val
  misc_feature (144)..(144): Absent or Ile
  misc_feature (145)..(145): Absent or Gly
  misc_feature (146)..(146): Absent or Thr
  misc_feature (147)..(147): Absent or Ala
  misc_feature (148)..(148): Absent or Val
  misc_feature (149)..(149): Absent or Ser
  misc_feature (150)..(150): Absent or Leu
  misc_feature (151)..(151): Absent or Gly
  misc_feature (152)..(152): Absent or Gly
  misc_feature (153)..(153): Absent or Ala
  misc_feature (154)..(154): Absent or Phe
  misc_feature (155)..(155): Absent or Leu
  misc_feature (156)..(156): Absent or Met
  misc_feature (157)..(157): Absent or Ala
  misc_feature (158)..(158): Absent or Leu
  misc_feature (159)..(159): Absent or Tyr
  misc_feature (160)..(160): Absent or Lys
  misc_feature (161)..(161): Absent or Gly
  misc_feature (162)..(162): Absent or Pro
  misc_feature (163)..(163): Absent or Val
  misc_feature (164)..(164): Absent or Val
  misc_feature (165)..(165): Absent or Asn
  misc_feature (166)..(166): Absent or Ile
  misc_feature (167)..(167): Absent or Ala
  misc_feature (168)..(168): Absent or Asp
  misc_feature (169)..(169): Absent or Ser
  misc_feature (170)..(170): Absent or Ser
  misc_feature (171)..(171): Absent or Ala
  misc_feature (172)..(172): Absent or Ser
  misc_feature (173)..(173): Absent or His
  misc_feature (174)..(174): Absent or Val
  misc_feature (175)..(175): Absent or Gly
  misc_feature (176)..(176): Absent or Arg
  misc_feature (177)..(177): Absent or Pro
  misc_feature (178)..(178): Absent or Asp
  misc_feature (179)..(179): Absent or Asn
  misc_feature (180)..(180): Absent or Val
  misc_feature (181)..(181): Absent or Asn
  misc_feature (182)..(182): Absent or Asp
  misc_feature (183)..(183): Absent or Pro
  misc_feature (184)..(184): Absent or Ser
  misc_feature (185)..(185): Absent or Gly
  misc_feature (186)..(186): Absent or Ser
  misc_feature (187)..(187): Absent or His
  misc_feature (188)..(188): Absent or Trp
  misc_feature (189)..(189): Absent or Leu
  misc_feature (190)..(190): Absent or Ile
  misc_feature (191)..(191): Absent or Gly
  misc_feature (192)..(192): Absent or Ala
  misc_feature (193)..(193): Absent or Cys
  misc_feature (194)..(194): Absent or Phe
  misc_feature (195)..(195): Absent or Leu
  misc_feature (196)..(196): Absent or Leu
  misc_feature (197)..(197): Absent or Ile
  misc_feature (198)..(198): Absent or Gly
  misc_feature (199)..(199): Absent or Cys
  misc_feature (200)..(200): Absent or Ala
  misc_feature (201)..(201): Absent or Gly
  misc_feature (202)..(202): Absent or Phe
  misc_feature (203)..(203): Absent or Ser
  misc_feature (204)..(204): Absent or Ala
  misc_feature (205)..(205): Absent or Phe
  misc_feature (206)..(206): Absent or Tyr
  misc_feature (207)..(207): Absent or Ile
  misc_feature (208)..(208): Absent or Leu
  misc_feature (209)..(209): Absent or Gln
  misc_feature (210)..(210): Absent or Ala
  misc_feature (211)..(211): Absent or Ile
  misc_feature (212)..(212): Absent or Thr
  misc_feature (213)..(213): Absent or Leu
  misc_feature (214)..(214): Absent or Arg
  misc_feature (215)..(215): Absent or Lys
  misc_feature (216)..(216): Absent or Tyr
  misc_feature (217)..(217): Absent or Pro
  misc_feature (218)..(218): Absent or Ala
  misc_feature (219)..(219): Absent or Glu
  misc_feature (220)..(220): Absent or Met
  misc_feature (221)..(221): Absent or Ser
  misc_feature (222)..(222): Absent or Leu
  misc_feature (223)..(223): Absent or Ala
  misc_feature (224)..(224): Absent or Thr
  misc_feature (225)..(225): Absent or Trp
  misc_feature (226)..(226): Absent or Val
  misc_feature (227)..(227): Absent or Cys
  misc_feature (228)..(228): Absent or Phe
  misc_feature (229)..(229): Absent or Val
  misc_feature (230)..(230): Absent or Gly
  misc_feature (231)..(231): Absent or Ala
  misc_feature (232)..(232): Absent or Leu
  misc_feature (233)..(233): Absent or Gln
  misc_feature (234)..(234): Absent or Ser
  misc_feature (235)..(235): Absent or Ser
  misc_feature (236)..(236): Absent or Ala
  misc_feature (237)..(237): Absent or Val
  misc_feature (238)..(238): Absent or Ser
  misc_feature (239)..(239): Absent or Phe
  misc_feature (240)..(240): Absent or Phe
  misc_feature (241)..(241): Absent or Met
  misc_feature (242)..(242): Absent or Glu
  misc_feature (243)..(243): Absent or Arg
  misc_feature (244)..(244): Absent or Asn
  misc_feature (245)..(245): Absent or Ser
  misc_feature (246)..(246): Absent or Pro
  misc_feature (247)..(247): Absent or His
  misc_feature (248)..(248): Absent or Val
  misc_feature (249)..(249): Absent or Trp
  misc_feature (250)..(250): Absent or Ser
  misc_feature (251)..(251): Absent or Leu
  misc_feature (252)..(252): Absent or Ala
  misc_feature (253)..(253): Absent or Trp
  misc_feature (254)..(254): Absent or Asp
  misc_feature (255)..(255): Absent or Ser
  misc_feature (256)..(256): Absent or Arg
  misc_feature (257)..(257): Absent or Leu
  misc_feature (258)..(258): Absent or Val
  misc_feature (259)..(259): Absent or Ala
  misc_feature (260)..(260): Absent or Tyr
  misc_feature (261)..(261): Absent or Ala
  misc_feature (262)..(262): Absent or Tyr
  misc_feature (263)..(263): Absent or Ser
  misc_feature (264)..(264): Absent or Gly
  misc_feature (265)..(265): Absent or Ile
  misc_feature (266)..(266): Absent or Val
  misc_feature (267)..(267): Absent or Thr
  misc_feature (268)..(268): Absent or Ser
  misc_feature (269)..(269): Absent or Ala
  misc_feature (270)..(270): Absent or Ile
  misc_feature (271)..(271): Absent or Gln
  misc_feature (272)..(272): Absent or Phe
  misc_feature (273)..(273): Absent or Tyr
  misc_feature (274)..(274): Absent or Val
  misc_feature (275)..(275): Absent or Gln
  misc_feature (276)..(276): Absent or Gly
  misc_feature (277)..(277): Absent or Met
  misc_feature (278)..(278): Absent or Val
  misc_feature (279)..(279): Absent or Ile
  misc_feature (280)..(280): Absent or Lys
  misc_feature (281)..(281): Absent or Thr
  misc_feature (282)..(282): Absent or Thr
  misc_feature (283)..(283): Absent or Gly
  misc_feature (284)..(284): Absent or Pro
  misc_feature (285)..(285): Absent or Val
  misc_feature (286)..(286): Absent or Phe
  misc_feature (287)..(287): Absent or Val
  misc_feature (288)..(288): Absent or Thr
  misc_feature (289)..(289): Absent or Ala
  misc_feature (290)..(290): Absent or Phe
  misc_feature (291)..(291): Absent or Asn
  misc_feature (292)..(292): Absent or Pro
  misc_feature (293)..(293): Absent or Leu
  misc_feature (294)..(294): Absent or Arg
  misc_feature (295)..(295): Absent or Met
  misc_feature (296)..(296): Absent or Ile
  misc_feature (297)..(297): Absent or Ile
  misc_feature (298)..(298): Absent or Val
  misc_feature (299)..(299): Absent or Thr
  misc_feature (300)..(300): Absent or Ala
  misc_feature (301)..(301): Absent or Leu
  misc_feature (302)..(302): Absent or Ala
  misc_feature (303)..(303): Absent or Cys
  misc_feature (304)..(304): Absent or Ile
  misc_feature (305)..(305): Absent or Val
  misc_feature (306)..(306): Absent or Leu
  misc_feature (307)..(307): Absent or Ser
  misc_feature (308)..(308): Absent or Glu
  misc_feature (309)..(309): Absent or Lys
  misc_feature (310)..(310): Absent or Leu
  misc_feature (311)..(311): Absent or His
  misc_feature (312)..(312): Absent or Leu
  misc_feature (313)..(313): Absent or Gly
  misc_feature (314)..(314): Absent or Ser
  misc_feature (315)..(315): Absent or Ile
  misc_feature (316)..(316): Absent or Ile
  misc_feature (317)..(317): Absent or Gly
  misc_feature (318)..(318): Absent or Gly
  misc_feature (319)..(319): Absent or Val
  misc_feature (320)..(320): Absent or Val
  misc_feature (321)..(321): Absent or Val
  misc_feature (322)..(322): Absent or Val
  misc_feature (323)..(323): Absent or Ile
  misc_feature (324)..(324): Absent or Gly
  misc_feature (325)..(325): Absent or Leu
  misc_feature (326)..(326): Absent or Tyr
  misc_feature (327)..(327): Absent or Leu
  misc_feature (328)..(328): Absent or Val
  misc_feature (329)..(329): Absent or Val
  misc_feature (330)..(330): Absent or Trp
  misc_feature (331)..(331): Absent or Gly
  misc_feature (332)..(332): Absent or Lys
  misc_feature (333)..(333): Absent or Ala
  misc_feature (334)..(334): Absent or Lys
  misc_feature (335)..(335): Absent or Glu
  misc_feature (336)..(336): Absent or Gln
  misc_feature (337)..(337): Absent or Lys
  misc_feature (338)..(338): Absent or His
  misc_feature (339)..(339): Absent or Leu
  misc_feature (348)..(348): Thr or Ile
  misc_feature (352)..(352): Gln or His
  misc_feature (371)..(371): Ala or Pro
  misc_feature (377)..(377): Gly or Glu
  misc_feature (380)..(380): Lys or Absent
  misc_feature (381)..(381): Arg or Absent
  misc_feature (382)..(382): Asp or Absent
  misc_feature (383)..(383): Asp or Asn
  misc_feature (384)..(384): Val or Ile
  misc_feature (385)..(385): Glu or Gly
  misc_feature (386)..(386): Ala or Pro
  misc_feature (387)..(387): Arg or Glu
  misc_feature (388)..(388): Thr or His
  misc_feature (389)..(389): Thr or Absent
  misc_feature (390)..(390): Thr or Absent
  misc_feature (391)..(391): Val or Absent
  misc_feature (392)..(392): Asn or Absent
  misc_feature (393)..(393): Leu or Absent
  misc_feature (394)..(394): Cys or Absent
  misc_feature (395)..(395): Gly or Absent
  misc_feature (396)..(396): Pro or Absent
  unsure (1)..(396): unsure at all Xaa locations
XXXXXXXXXXXXXXXXXXXXXXXXXXXXXXXXXXXXXXXXXXXXXXXXXXXXXXXXXXXXXXXXXXXXXXXXXXXXXXXXXXXXXXXXXXXXXXXXXXXXXXXXXXXXXXXXXXXXXXXXXXXXXXXXXXXXXXXXXXXXXXXXXXXXXXXXXXXXXXXXXXXXXXXXXXXXXXXXXXXXXXXXXXXXXXXXXXXXXXXXXXXXXXXXXXXXXXXXXXXXXXXXXXXXXXXXXXXXXXXXXXXXXXXXXXXXXXXXXXXXXXXXXXXXXXXXXXXXXXXXXXXXXXXXXXXXXXXXXXXXXXXXXXXXXXXXXXXXXXXXXXXXXXXXXXXXXXXXXXXMPPSPEKVXLQRXQQLPVTVPISDDANDNNKXQLVIIXDRXXXXXXXXXXXXXXXXX

SEQ ID NO: 36478 - protein, 2156 aa, Artificial sequence
  consensus sequence of seq id no: 611  and its homologs
  misc_feature (1)..(1): Absent or Met
  misc_feature (2)..(2): Absent or Thr
  misc_feature (3)..(3): Absent or Thr
  misc_feature (4)..(4): Absent or Lys
  misc_feature (5)..(5): Absent or Ala
  misc_feature (6)..(6): Absent or Lys
  misc_feature (7)..(7): Absent or Gly
  misc_feature (8)..(8): Absent or Lys
  misc_feature (9)..(9): Absent or His
  misc_feature (10)..(10): Absent or Cys
  misc_feature (11)..(11): Absent or Ser
  misc_feature (12)..(12): Absent or Tyr
  misc_feature (13)..(13): Absent or Leu
  misc_feature (14)..(14): Absent or Pro
  misc_feature (15)..(15): Absent or Val
  misc_feature (16)..(16): Absent or Thr
  misc_feature (17)..(17): Absent or Glu
  misc_feature (18)..(18): Absent or Ala
  misc_feature (19)..(19): Absent or Lys
  misc_feature (20)..(20): Absent or Ala
  misc_feature (21)..(21): Absent or Glu
  misc_feature (22)..(22): Absent or Thr
  misc_feature (23)..(23): Absent or Glu
  misc_feature (24)..(24): Absent or Ala
  misc_feature (25)..(25): Absent or Asp
  misc_feature (26)..(26): Absent or His
  misc_feature (27)..(27): Absent or Gln
  misc_feature (28)..(28): Absent or Leu
  misc_feature (29)..(29): Absent or Met
  misc_feature (30)..(30): Absent or Arg
  misc_feature (31)..(31): Absent or Asp
  misc_feature (32)..(32): Absent or Ala
  misc_feature (33)..(33): Absent or Glu
  misc_feature (34)..(34): Absent or Ser
  misc_feature (35)..(35): Absent or Gly
  misc_feature (36)..(36): Absent or Trp
  misc_feature (37)..(37): Absent or Ser
  misc_feature (38)..(38): Absent or Ser
  misc_feature (39)..(39): Absent or Met or Lys
  misc_feature (40)..(40): Absent or Ser or Glu
  misc_feature (41)..(41): Absent or Arg or Asp or Met
  misc_feature (42)..(42): Absent or Ser or Pro or Asp
  misc_feature (43)..(43): Absent or Gln or Pro
  misc_feature (44)..(44): Absent or Leu or Gln or Thr
  misc_feature (45)..(45): Met or Absent or Leu
  misc_feature (46)..(46): Gln or Absent or Arg or His or Val or Phe
  misc_feature (47)..(47): Met or Absent or Ser or Arg
  misc_feature (48)..(48): Thr or Absent or Asn or Tyr or Val
  misc_feature (49)..(49): Arg or Absent or Met or Lys
  misc_feature (50)..(50): Leu or Absent or Pro or Glu or Thr or Ala
  misc_feature (51)..(51): Glu or Absent or Gln or Gly or Asn or Ser or Arg
  misc_feature (52)..(52): Asp or Absent or Gly or Glu or Pro or Gln or Lys or Thr
  misc_feature (53)..(53): Leu or Absent or Gly or Asp or Gln
  misc_feature (54)..(54): Thr or Absent or Gly
  misc_feature (55)..(55): Pro or Absent or Cys
  misc_feature (56)..(56): Ala or Absent or Thr
  misc_feature (57)..(57): Absent or Pro or Phe
  misc_feature (58)..(58): Pro or Absent or Ala or Ser
  misc_feature (59)..(59): Ser or Absent or His or Asp or Gly or Glu
  misc_feature (60)..(60): Met or Absent or Leu or Phe or Tyr or Ser or Asn
  misc_feature (61)..(61): Thr or Ala or Absent or Ser
  misc_feature (62)..(62): Leu or Pro or Ile or Absent
  misc_feature (64)..(64): Ile or Met or Absent or Gln or His or Tyr
  misc_feature (65)..(65): Glu or Ser or Ala or Val or Ile or Met or Absent
  misc_feature (66)..(66): His or Ser or Asp or Absent
  misc_feature (67)..(67): Ser or Leu or Thr or Pro or Ala or Absent
  misc_feature (71)..(71): Thr or Val or Ser or Absent
  misc_feature (83)..(83): Leu or Phe or Ile or Absent
  misc_feature (84)..(84): Val or Met or Ile or Ser or Absent
  misc_feature (87)..(87): Ala or Ser or Cys or Thr or Absent
  misc_feature (91)..(91): Met or Ile or Leu or Val or Absent
  misc_feature (101)..(101): Leu or Phe or His or Absent
  misc_feature (103)..(103): Ala or Ser or Cys or Glu or Absent
  misc_feature (104)..(104): Leu or Phe or Absent
  misc_feature (105)..(105): Leu or Absent or Cys
  misc_feature (106)..(106): Arg or Trp or Absent
  misc_feature (107)..(107): Ser or Arg or His or Absent
  misc_feature (109)..(109): His or Ser or Absent
  misc_feature (110)..(110): Pro or Thr or Leu or Phe or Ser or Absent
  misc_feature (111)..(111): Ala or Gly or Asp or Glu or Ser or Absent
  misc_feature (112)..(112): Leu or Met or Absent or Val or Asp or His or Glu or Asn or Ser
  misc_feature (113)..(113): Phe or Met or Ile or His or Leu or Asp or Gly or Ala or Absent
  misc_feature (114)..(114): Gln or Leu or Thr or Glu or Arg or Pro or Absent or Ser
  misc_feature (115)..(115): Glu or Gln or Ser or Absent or Gly
  misc_feature (116)..(116): Ser or Gly or Ala or Asp or Glu or Absent or His
  misc_feature (117)..(117): Glu or Absent or Gly or Pro
  misc_feature (118)..(118): Absent or Glu or Pro or Gln or Ser
  misc_feature (119)..(119): His or Absent or Asn or Ala or Asp or Arg
  misc_feature (120)..(120): Thr or Absent or Ala or Pro
  misc_feature (121)..(121): Ala or Absent or Val or Gln or Glu or Gly or Ser
  misc_feature (122)..(122): Ile or Thr or Val or Ser or Ala
  misc_feature (123)..(123): Ser or Arg or His or Asp or Tyr or Thr
  misc_feature (124)..(124): Ile or Val or Thr or Lys
  misc_feature (125)..(125): Ala or Gly or Pro or Gln or Arg or Glu or Lys
  misc_feature (126)..(126): Ser or Pro or His or Glu or Thr or Ala or Tyr
  misc_feature (127)..(127): Thr or Ser or Absent or Pro or Asn or Gly
  misc_feature (128)..(128): Absent or Ser
  misc_feature (129)..(129): Absent or Pro
  misc_feature (131)..(131): Ser or Arg or Pro or Tyr or Phe
  misc_feature (133)..(133): Thr or Ala or Ser or Pro or Gln
  misc_feature (134)..(134): Thr or Val or Ser or Lys or X or Arg or Absent
  misc_feature (135)..(135): Ser or Cys or Pro or Absent or Leu
  misc_feature (136)..(136): Absent or Glu
  misc_feature (137)..(137): Absent or Tyr
  misc_feature (138)..(138): Absent or Thr
  misc_feature (139)..(139): Absent or Val
  misc_feature (140)..(140): Absent or Asn
  misc_feature (141)..(141): Absent or Leu
  misc_feature (142)..(142): Absent or Pro
  misc_feature (143)..(143): Absent or Asn
  misc_feature (144)..(144): Absent or Leu
  misc_feature (145)..(145): Absent or Asn
  misc_feature (146)..(146): Absent or Leu
  misc_feature (147)..(147): Absent or Asn
  misc_feature (148)..(148): Absent or Tyr
  misc_feature (149)..(149): Absent or Arg
  misc_feature (150)..(150): Absent or Gln
  misc_feature (151)..(151): Absent or Ile
  misc_feature (152)..(152): Absent or Ile
  misc_feature (153)..(153): Absent or Asp
  misc_feature (154)..(154): Absent or Phe
  misc_feature (155)..(155): Absent or Cys
  misc_feature (156)..(156): Absent or Leu
  misc_feature (157)..(157): Absent or Val
  misc_feature (158)..(158): Absent or Ile
  misc_feature (159)..(159): Absent or Thr
  misc_feature (160)..(160): Absent or Cys
  misc_feature (161)..(161): Absent or Thr
  misc_feature (162)..(162): Absent or Leu
  misc_feature (163)..(163): Absent or Leu
  misc_feature (164)..(164): Absent or Asn
  misc_feature (165)..(165): Absent or Ser
  misc_feature (166)..(166): Asp or Gly or Glu or Absent or His or Leu
  misc_feature (167)..(167): His or Pro or Ser or X or Phe or Absent
  misc_feature (168)..(168): Lys or His or Thr or X or Gln or Asn or Phe or Absent
  misc_feature (169)..(169): Leu or Ser or Asn or Met or Glu or X or Pro or Absent
  misc_feature (170)..(170): Glu or Asp or Lys or Thr or X or Absent
  misc_feature (171)..(171): Lys or Arg or Trp or Glu or X or Leu or Absent or Met
  misc_feature (172)..(172): Val or Ala or Ser or Lys or Gly or X or Absent
  misc_feature (173)..(173): Gly or Absent or Glu or Gln or X or Lys
  misc_feature (174)..(174): Lys or Absent or Glu or Asn or X or Tyr or Pro
  misc_feature (175)..(175): Glu or Absent or Gln or Lys or X or His
  misc_feature (176)..(176): Cys or Arg or Ser or Gly or X or Asn or Absent or Asp
  misc_feature (177)..(177): Gly or Pro or Gln or X or Absent or Leu
  misc_feature (178)..(178): Leu or Val or Cys or Ser or X or Gly or Absent
  misc_feature (179)..(179): Pro or Ala or Leu or X or Met or Absent or Phe or Val or Ile
  misc_feature (180)..(180): Absent or Val or Arg or Pro or Thr or X
  misc_feature (182)..(182): Ile or Tyr or Leu or X or Val or Absent
  misc_feature (187)..(187): Lys or Gln or Asn or Arg or Glu or X or Asp or Absent
  misc_feature (188)..(188): Ile or Val or Gly or Ala or X or Thr
  misc_feature (192)..(192): Phe or Leu or Tyr or Ile or X or Cys or Val
  misc_feature (194)..(194): Absent or Met or Asp or Ile or X or Leu or Phe
  misc_feature (195)..(195): Absent or Ala or Gly or Pro or X or Leu
  misc_feature (196)..(196): Arg or Glu or Cys or X or Thr or Absent
  misc_feature (199)..(199): Pro or Val or Gln or X or Glu or Leu or Absent or Ala
  misc_feature (200)..(200): His or Arg or Ser or Ile or X or Pro or Absent
  misc_feature (201)..(201): Glu or Gly or Arg or Val or Ser or X or Pro or Tyr or Absent
  misc_feature (202)..(202): Thr or Pro or Ala or Lys or Arg or X or Absent
  misc_feature (203)..(203): Absent or Ser or Glu or Val or Leu or X or Gly or Ala or Pro
  misc_feature (204)..(204): Absent or Leu or Ala or Glu or X or Ser
  misc_feature (205)..(205): Cys or Ala or Absent or Thr or Glu or X or Lys or Asn
  misc_feature (206)..(206): Leu or Ala or Absent or Cys or Pro or Ile or X or Arg or Val
  misc_feature (207)..(207): Pro or Glu or Absent or Leu or Ile or X or Val or Thr
  misc_feature (208)..(208): Absent or Gln or Lys or Arg or Ser or Pro or Ala or Val or X or Thr or Leu
  misc_feature (209)..(209): Glu or Ala or Thr or Ser or Phe or Asn or X or Ile or Absent or Lys or Asp
  misc_feature (210)..(210): Ala or Thr or Ser or Arg or Ile or X or Glu or Absent or Val
  misc_feature (211)..(211): Asp or Glu or Ser or Ala or X or Val or Absent or Pro or Gln
  misc_feature (212)..(212): Lys or Cys or Arg or Glu or Pro or X or Gln or Absent or Ser or Thr
  misc_feature (213)..(213): Thr or Arg or Glu or Lys or Leu or Pro or X or Absent
  misc_feature (214)..(214): Glu or Ala or Asp or Gly or Absent or Tyr or Ser or X or Pro
  misc_feature (215)..(215): Absent or Gly or His or Glu or Ser or X or Pro or Gln
  misc_feature (216)..(216): Val or Gln or Arg or Ala or Absent or Lys or X or Ser
  misc_feature (217)..(217): Pro or Glu or Met or Absent or X or Ala
  misc_feature (218)..(218): Leu or Ser or Pro or Val or Absent or X
  misc_feature (219)..(219): Glu or Ser or Gly or Gln or Ile or Absent or X or Pro or Val
  misc_feature (220)..(220): Thr or Val or Ser or Pro or Absent or X or Arg or Lys
  misc_feature (221)..(221): Lys or Arg or Ser or Gly or Absent or X or Leu or Pro
  misc_feature (222)..(222): Cys or Ser or Ile or Gly or Val or Absent or X or Pro or Ala
  misc_feature (223)..(223): Ser or Cys or Thr or Ala or Absent or X or Arg or Leu
  misc_feature (224)..(224): Asp or Met or Ile or Leu or Val or Absent or X or Phe
  misc_feature (225)..(225): His or Ser or Arg or Pro or Met or Absent or X
  misc_feature (226)..(226): Glu or Arg or Asp or Gln or Absent or His or X or Val or Ile
  misc_feature (227)..(227): Pro or Glu or Tyr or Absent or Ser or Thr or X
  misc_feature (228)..(228): Ser or Leu or Absent or X
  misc_feature (229)..(229): Val or Thr or Tyr or Absent or X or Cys
  misc_feature (230)..(230): Ser or Val or Thr or Absent or Trp or X
  misc_feature (231)..(231): Ile or Val or Ser or Absent or Trp or X
  misc_feature (232)..(232): Cys or Absent or His or X
  misc_feature (233)..(233): Ile or Absent or Leu or X
  misc_feature (234)..(234): His or Absent or Ala or X
  misc_feature (235)..(235): Glu or Absent or Ile or X
  misc_feature (236)..(236): Ser or Absent or Leu or X
  misc_feature (237)..(237): Thr or Absent or Lys or X
  misc_feature (238)..(238): Val or Absent or Tyr or X
  misc_feature (239)..(239): Ser or Absent or Glu or X
  misc_feature (240)..(240): Cys or Absent or Pro or X
  misc_feature (241)..(241): Absent or Ala or X
  misc_feature (242)..(242): Absent or Ile or X
  misc_feature (243)..(243): Absent or Asp or X
  misc_feature (244)..(244): Absent or Gly or X
  misc_feature (245)..(245): Absent or Ala or X
  misc_feature (246)..(246): Absent or Tyr or X
  misc_feature (247)..(247): Absent or Arg or X
  misc_feature (248)..(248): Absent or Gly or X
  misc_feature (249)..(249): Absent or Trp or X
  misc_feature (250)..(250): Absent or Arg or X
  misc_feature (251)..(251): Absent or Gln or X
  misc_feature (252)..(252): Absent or Phe or X
  misc_feature (253)..(253): Absent or Gly or X
  misc_feature (254)..(254): Absent or Trp or X
  misc_feature (255)..(255): Absent or Gly or X
  misc_feature (256)..(256): Absent or Phe or X
  misc_feature (257)..(257): Absent or Ala or X
  misc_feature (258)..(258): Absent or Val or X
  misc_feature (259)..(259): Absent or Ala or X
  misc_feature (260)..(260): Absent or Met or X
  misc_feature (261)..(261): Absent or Arg or X
  misc_feature (262)..(262): Absent or Ala or X
  misc_feature (263)..(263): Absent or Asp or X
  misc_feature (264)..(264): Absent or Gly or X
  misc_feature (265)..(265): Absent or Cys or X
  misc_feature (266)..(266): Absent or Pro or X
  misc_feature (267)..(267): Absent or Leu or X
  misc_feature (268)..(268): Absent or Cys or X
  misc_feature (269)..(269): Absent or Trp or X
  misc_feature (270)..(270): Absent or Thr or X
  misc_feature (271)..(271): Absent or Ala or X
  misc_feature (272)..(272): Absent or Ile or X
  misc_feature (273)..(273): Absent or Arg or X
  misc_feature (274)..(274): Absent or Val or X
  misc_feature (275)..(275): Absent or Gln or X
  misc_feature (276)..(276): Absent or Thr or X
  misc_feature (277)..(277): Absent or Val or X
  misc_feature (278)..(278): Absent or Tyr or X
  misc_feature (279)..(279): Absent or Asp or X
  misc_feature (280)..(280): Absent or Ala or X
  misc_feature (281)..(281): Absent or Tyr or X
  misc_feature (282)..(282): Absent or Gly or X
  misc_feature (283)..(283): Absent or Pro or X
  misc_feature (284)..(284): Absent or Leu or X
  misc_feature (285)..(285): Absent or Thr or X
  misc_feature (286)..(286): Absent or Leu or X
  misc_feature (287)..(287): Absent or Tyr or X
  misc_feature (288)..(288): Absent or Arg or X
  misc_feature (289)..(289): Absent or Asp or X
  misc_feature (290)..(290): Absent or Leu or X
  misc_feature (291)..(291): Absent or Val or X
  misc_feature (292)..(292): Absent or Ser or X
  misc_feature (293)..(293): Absent or Gln or X
  misc_feature (294)..(294): Absent or Gly or X
  misc_feature (295)..(295): Absent or Lys or X
  misc_feature (296)..(296): Absent or Leu or X
  misc_feature (297)..(297): Absent or Gln or X
  misc_feature (298)..(298): Absent or His or X
  misc_feature (299)..(299): Absent or Asp or X
  misc_feature (300)..(300): Absent or Ile or X
  misc_feature (301)..(301): Absent or Tyr or X
  misc_feature (302)..(302): Absent or Gln or X
  misc_feature (303)..(303): Absent or Glu or X
  misc_feature (304)..(304): Absent or Asn or X
  misc_feature (305)..(305): Absent or Val or X
  misc_feature (306)..(306): Absent or Ala or X
  misc_feature (307)..(307): Absent or Thr or X
  misc_feature (308)..(308): Absent or Gln or X
  misc_feature (309)..(309): Absent or Leu or X
  misc_feature (310)..(310): Absent or Asp or X
  misc_feature (311)..(311): Absent or Asn or X
  misc_feature (312)..(312): Absent or Leu or X
  misc_feature (313)..(313): Absent or Leu or X
  misc_feature (314)..(314): Absent or Arg or X
  misc_feature (315)..(315): Absent or Arg or X
  misc_feature (316)..(316): Absent or Leu or X
  misc_feature (317)..(317): Absent or Glu or X
  misc_feature (318)..(318): Absent or Gln or X
  misc_feature (319)..(319): Absent or Tyr or X
  misc_feature (320)..(320): Absent or Glu or X
  misc_feature (321)..(321): Absent or Met or X
  misc_feature (322)..(322): Absent or Glu or X
  misc_feature (323)..(323): Absent or Met or X
  misc_feature (324)..(324): Absent or Glu or X
  misc_feature (325)..(325): Absent or Asp or X
  misc_feature (326)..(326): Absent or Tyr or X
  misc_feature (327)..(327): Absent or His or X
  misc_feature (328)..(328): Absent or Ala or X
  misc_feature (329)..(329): Absent or Arg or X
  misc_feature (330)..(330): Absent or Leu or X
  misc_feature (331)..(331): Absent or Ser or X
  misc_feature (332)..(332): Absent or Met or X
  misc_feature (333)..(333): Absent or Trp or X
  misc_feature (334)..(334): Absent or Glu or X
  misc_feature (335)..(335): Absent or Asn or X
  misc_feature (336)..(336): Absent or Thr or X
  misc_feature (337)..(337): Absent or Arg or X
  misc_feature (338)..(338): Absent or Glu or X
  misc_feature (339)..(339): Absent or Lys or X
  misc_feature (340)..(340): Absent or Gln or X
  misc_feature (341)..(341): Absent or Arg or X
  misc_feature (342)..(342): Absent or Arg or X
  misc_feature (343)..(343): Absent or Arg or X
  misc_feature (344)..(344): Absent or Leu or X
  misc_feature (345)..(345): Absent or Leu or X
  misc_feature (346)..(346): Absent or Val or X
  misc_feature (347)..(347): Absent or Gln or X
  misc_feature (348)..(348): Absent or Glu or X
  misc_feature (349)..(349): Absent or Ala or X
  misc_feature (350)..(350): Absent or Glu or X
  misc_feature (351)..(351): Absent or Asp or X
  misc_feature (352)..(352): Absent or Lys or X
  misc_feature (353)..(353): Absent or Gln or X
  misc_feature (354)..(354): Absent or Arg or X
  misc_feature (355)..(355): Absent or Asp or X
  misc_feature (356)..(356): Absent or Gly or X
  misc_feature (357)..(357): Absent or Val or X
  misc_feature (358)..(358): Absent or Trp or X
  misc_feature (359)..(359): Absent or Ile or X
  misc_feature (360)..(360): Absent or Asp or X
  misc_feature (361)..(361): Absent or Glu or X
  misc_feature (362)..(362): Absent or Lys or X
  misc_feature (363)..(363): Absent or Arg or X
  misc_feature (364)..(364): Absent or Gly or X
  misc_feature (365)..(365): Absent or Phe or X
  misc_feature (366)..(366): Absent or Leu or X
  misc_feature (367)..(367): Absent or Asp or X
  misc_feature (368)..(368): Absent or Lys or X
  misc_feature (369)..(369): Absent or Leu or X
  misc_feature (370)..(370): Absent or Val or X
  misc_feature (371)..(371): Absent or Ser or X
  misc_feature (372)..(372): Absent or Arg or X
  misc_feature (373)..(373): Absent or Lys or X
  misc_feature (374)..(374): Absent or Arg or X
  misc_feature (375)..(375): Absent or Arg or X
  misc_feature (376)..(376): Absent or Gly or X
  misc_feature (377)..(377): Absent or Asn or X
  misc_feature (378)..(378): Absent or Ile or X
  misc_feature (379)..(379): Absent or Glu or X
  misc_feature (380)..(380): Absent or Pro or X
  misc_feature (381)..(381): Absent or Gly or X
  misc_feature (382)..(382): Absent or Val or X
  misc_feature (383)..(383): Absent or Gly or X
  misc_feature (384)..(384): Absent or Lys or X
  misc_feature (385)..(385): Absent or Trp or X
  misc_feature (386)..(386): Absent or Val or X
  misc_feature (387)..(387): Absent or Ser or X
  misc_feature (388)..(388): Absent or Tyr or X
  misc_feature (389)..(389): Absent or Leu or X
  misc_feature (390)..(390): Absent or Asn or X
  misc_feature (391)..(391): Absent or Arg or X
  misc_feature (392)..(392): Absent or Glu or X
  misc_feature (393)..(393): Absent or Lys or X
  misc_feature (394)..(394): Absent or Lys or X
  misc_feature (395)..(395): Absent or Leu or X
  misc_feature (396)..(396): Absent or Asp or X
  misc_feature (397)..(397): Absent or Thr or X
  misc_feature (398)..(398): Absent or Leu or X
  misc_feature (399)..(399): Absent or Val or X
  misc_feature (400)..(400): Absent or Gly or X
  misc_feature (401)..(401): Absent or Gln or X
  misc_feature (402)..(402): Absent or Lys or X
  misc_feature (403)..(403): Absent or Pro or X
  misc_feature (404)..(404): Absent or Val or X
  misc_feature (405)..(405): Absent or Ala or X
  misc_feature (406)..(406): Absent or Pro or X
  misc_feature (407)..(407): Absent or Ile or X
  misc_feature (408)..(408): Absent or Ala or X
  misc_feature (409)..(409): Absent or Pro or X
  misc_feature (410)..(410): Absent or Lys or X
  misc_feature (411)..(411): Absent or Gly or X
  misc_feature (412)..(412): Absent or Ile or X
  misc_feature (413)..(413): Absent or Tyr or X
  misc_feature (414)..(414): Absent or Leu or X
  misc_feature (415)..(415): Absent or Tyr or X
  misc_feature (416)..(416): Absent or Gly or X
  misc_feature (417)..(417): Absent or Asn or X
  misc_feature (418)..(418): Absent or Val or X
  misc_feature (419)..(419): Absent or Gly or X
  misc_feature (420)..(420): Absent or Ser or X
  misc_feature (421)..(421): Absent or Gly or X
  misc_feature (422)..(422): Absent or Lys or X
  misc_feature (423)..(423): Absent or Thr or X
  misc_feature (424)..(424): Absent or Met or X
  misc_feature (425)..(425): Absent or Leu or X
  misc_feature (426)..(426): Absent or Met or X
  misc_feature (427)..(427): Absent or Asp or X
  misc_feature (428)..(428): Absent or Met or X
  misc_feature (429)..(429): Absent or Phe or X
  misc_feature (430)..(430): Absent or Tyr or X
  misc_feature (431)..(431): Absent or Gly or X
  misc_feature (432)..(432): Absent or Ala or X
  misc_feature (433)..(433): Absent or Thr or X
  misc_feature (434)..(434): Absent or Glu or X
  misc_feature (435)..(435): Absent or Gly or X
  misc_feature (436)..(436): Absent or Leu or X
  misc_feature (437)..(437): Absent or Ile or X
  misc_feature (438)..(438): Absent or Lys or X
  misc_feature (439)..(439): Absent or His or X
  misc_feature (440)..(440): Absent or Arg or X
  misc_feature (441)..(441): Absent or Arg or X
  misc_feature (442)..(442): Absent or Arg or X
  misc_feature (443)..(443): Absent or Phe or X
  misc_feature (444)..(444): Absent or His or X
  misc_feature (445)..(445): Absent or Phe or X
  misc_feature (446)..(446): Absent or His or X
  misc_feature (447)..(447): Absent or Glu or X
  misc_feature (448)..(448): Absent or Ala or X
  misc_feature (449)..(449): Absent or Met or X
  misc_feature (450)..(450): Absent or Leu or X
  misc_feature (451)..(451): Absent or Glu or X
  misc_feature (452)..(452): Absent or Ile or X
  misc_feature (453)..(453): Absent or His or X
  misc_feature (454)..(454): Absent or Asp or X
  misc_feature (455)..(455): Absent or His or X
  misc_feature (456)..(456): Absent or Met or X
  misc_feature (457)..(457): Absent or His or X
  misc_feature (458)..(458): Absent or Asp or X
  misc_feature (459)..(459): Absent or Val or X
  misc_feature (460)..(460): Absent or Trp or X
  misc_feature (461)..(461): Absent or Lys or X
  misc_feature (462)..(462): Absent or Arg or X
  misc_feature (463)..(463): Absent or Arg or X
  misc_feature (464)..(464): Absent or Asp or X
  misc_feature (465)..(465): Absent or Glu or X
  misc_feature (466)..(466): Absent or Asp or X
  misc_feature (467)..(467): Absent or Lys or X
  misc_feature (468)..(468): Absent or Ser or X
  misc_feature (469)..(469): Absent or Ile or X
  misc_feature (470)..(470): Absent or Glu or X
  misc_feature (471)..(471): Absent or Ser or X
  misc_feature (472)..(472): Absent or Ser or X
  misc_feature (473)..(473): Absent or Ala or X
  misc_feature (474)..(474): Absent or Phe or X
  misc_feature (475)..(475): Absent or Ser or X
  misc_feature (476)..(476): Absent or Trp or X
  misc_feature (477)..(477): Absent or Ile or X
  misc_feature (478)..(478): Absent or Ser or X
  misc_feature (479)..(479): Absent or Ser or X
  misc_feature (480)..(480): Absent or Leu or X
  misc_feature (481)..(481): Absent or Pro or X
  misc_feature (482)..(482): Absent or Phe or X
  misc_feature (483)..(483): Absent or Asp or X
  misc_feature (484)..(484): Absent or Gly or X
  misc_feature (485)..(485): Absent or Lys or X
  misc_feature (486)..(486): Absent or Ile or X
  misc_feature (487)..(487): Absent or Lys or X
  misc_feature (488)..(488): Absent or Glu or X
  misc_feature (489)..(489): Absent or Trp or X
  misc_feature (490)..(490): Absent or Leu or X
  misc_feature (491)..(491): Absent or Ile or X
  misc_feature (492)..(492): Absent or Gly or X
  misc_feature (493)..(493): Absent or Glu or X
  misc_feature (494)..(494): Absent or Glu or X
  misc_feature (495)..(495): Absent or Lys or X
  misc_feature (496)..(496): Absent or Tyr or X
  misc_feature (497)..(497): Absent or Lys or X
  misc_feature (498)..(498): Absent or Gln or X
  misc_feature (499)..(499): Absent or Asn or X
  misc_feature (500)..(500): Absent or Thr or X
  misc_feature (501)..(501): Absent or Gln or X
  misc_feature (502)..(502): Absent or Gln or X
  misc_feature (503)..(503): Absent or Asn or X
  misc_feature (504)..(504): Absent or His or X
  misc_feature (505)..(505): Absent or Ile or X
  misc_feature (506)..(506): Absent or Leu or X
  misc_feature (507)..(507): Absent or Leu or X
  misc_feature (508)..(508): Absent or Ala or X
  misc_feature (509)..(509): Absent or Val or X
  misc_feature (510)..(510): Absent or Ala or X
  misc_feature (511)..(511): Absent or Asp or X
  misc_feature (512)..(512): Absent or Lys or X
  misc_feature (513)..(513): Absent or Phe or X
  misc_feature (514)..(514): Absent or Leu or X
  misc_feature (515)..(515): Absent or Val or X
  misc_feature (516)..(516): Absent or Asp or X
  misc_feature (517)..(517): Absent or Arg or X
  misc_feature (518)..(518): Absent or Gln or X
  misc_feature (519)..(519): Absent or Ala or X
  misc_feature (520)..(520): Absent or Asn or X
  misc_feature (521)..(521): Absent or Lys or X
  misc_feature (522)..(522): Absent or Ser or X
  misc_feature (523)..(523): Absent or Gly or X
  misc_feature (524)..(524): Absent or Ala or X
  misc_feature (525)..(525): Absent or Ser or X
  misc_feature (526)..(526): Absent or Ile or X
  misc_feature (527)..(527): Absent or Leu or X
  misc_feature (528)..(528): Absent or Cys or X
  misc_feature (529)..(529): Absent or Phe or X
  misc_feature (530)..(530): Absent or Asp or X
  misc_feature (531)..(531): Absent or Glu or X
  misc_feature (532)..(532): Absent or Ile or X
  misc_feature (533)..(533): Absent or Gln or X
  misc_feature (534)..(534): Absent or Thr or X
  misc_feature (535)..(535): Absent or Ile or X
  misc_feature (536)..(536): Absent or Asp or X
  misc_feature (537)..(537): Absent or Val or X
  misc_feature (538)..(538): Absent or Phe or X
  misc_feature (539)..(539): Absent or Ala or X
  misc_feature (540)..(540): Absent or Val or X
  misc_feature (541)..(541): Absent or Val or X
  misc_feature (542)..(542): Absent or Ala or X
  misc_feature (543)..(543): Absent or Leu or X
  misc_feature (544)..(544): Absent or Ser or X
  misc_feature (545)..(545): Absent or Gly or X
  misc_feature (546)..(546): Absent or Ile or X
  misc_feature (547)..(547): Absent or Leu or X
  misc_feature (548)..(548): Absent or Ser or X
  misc_feature (549)..(549): Absent or Arg or X
  misc_feature (550)..(550): Absent or Leu or X
  misc_feature (551)..(551): Absent or Leu or X
  misc_feature (552)..(552): Absent or Ser or X
  misc_feature (553)..(553): Absent or Thr or X
  misc_feature (554)..(554): Absent or Gly or X
  misc_feature (555)..(555): Absent or Thr or X
  misc_feature (556)..(556): Absent or Val or X
  misc_feature (557)..(557): Absent or Leu or X
  misc_feature (558)..(558): Absent or Val or X
  misc_feature (559)..(559): Absent or Ser or X
  misc_feature (560)..(560): Absent or Thr or X
  misc_feature (561)..(561): Absent or Ser or X
  misc_feature (562)..(562): Absent or Asn or X
  misc_feature (563)..(563): Absent or Lys or X
  misc_feature (564)..(564): Absent or Ala or X
  misc_feature (565)..(565): Absent or Pro or X
  misc_feature (566)..(566): Absent or Glu or X
  misc_feature (567)..(567): Absent or Asp or X
  misc_feature (568)..(568): Absent or Leu or X
  misc_feature (569)..(569): Absent or Asn or X
  misc_feature (570)..(570): Absent or Gln or X
  misc_feature (571)..(571): Absent or Asp or X
  misc_feature (572)..(572): Absent or Gly or X
  misc_feature (573)..(573): Absent or Met or X
  misc_feature (574)..(574): Absent or Gln or X
  misc_feature (575)..(575): Absent or Arg or X
  misc_feature (576)..(576): Absent or Glu or X
  misc_feature (577)..(577): Absent or Ile or X
  misc_feature (578)..(578): Absent or Phe or X
  misc_feature (579)..(579): Absent or Leu or X
  misc_feature (580)..(580): Absent or Asp or X
  misc_feature (581)..(581): Absent or Leu or X
  misc_feature (582)..(582): Absent or Leu or X
  misc_feature (583)..(583): Absent or Ser or X
  misc_feature (584)..(584): Absent or Lys or X
  misc_feature (585)..(585): Absent or Leu or X
  misc_feature (586)..(586): Absent or Asp or X
  misc_feature (587)..(587): Absent or Glu or X
  misc_feature (588)..(588): Absent or Asn or X
  misc_feature (589)..(589): Absent or Cys or X
  misc_feature (590)..(590): Absent or Asn or X
  misc_feature (591)..(591): Absent or Lys or X
  misc_feature (592)..(592): Absent or Ile or X
  misc_feature (593)..(593): Absent or Leu or X
  misc_feature (594)..(594): Absent or Val or X
  misc_feature (595)..(595): Absent or Gly or X
  misc_feature (596)..(596): Absent or Thr or X
  misc_feature (597)..(597): Absent or Glu or X
  misc_feature (598)..(598): Absent or Thr or X
  misc_feature (599)..(599): Absent or Asp or X
  misc_feature (600)..(600): Absent or Tyr or X
  misc_feature (601)..(601): Absent or Arg or X
  misc_feature (602)..(602): Absent or Arg or X
  misc_feature (603)..(603): Absent or Leu or X
  misc_feature (604)..(604): Absent or Ile or X
  misc_feature (605)..(605): Absent or Pro or X
  misc_feature (606)..(606): Absent or Thr or X
  misc_feature (607)..(607): Absent or Asp or X
  misc_feature (608)..(608): Absent or Gly or X
  misc_feature (609)..(609): Absent or Leu or X
  misc_feature (610)..(610): Absent or Thr or X
  misc_feature (611)..(611): Absent or Gln or X
  misc_feature (612)..(612): Absent or Ile or X
  misc_feature (613)..(613): Absent or His or X
  misc_feature (614)..(614): Absent or Tyr or X
  misc_feature (615)..(615): Absent or Phe or X
  misc_feature (616)..(616): Absent or Trp or X
  misc_feature (617)..(617): Absent or Pro or X
  misc_feature (618)..(618): Absent or Leu or X
  misc_feature (619)..(619): Absent or Thr or X
  misc_feature (620)..(620): Absent or Ser or X
  misc_feature (621)..(621): Absent or Asp or X
  misc_feature (622)..(622): Absent or Ile or X
  misc_feature (623)..(623): Absent or Arg or X
  misc_feature (624)..(624): Absent or Ser or X
  misc_feature (625)..(625): Absent or Met or X
  misc_feature (626)..(626): Absent or Tyr or X
  misc_feature (627)..(627): Absent or Glu or X
  misc_feature (628)..(628): Absent or Ala or X
  misc_feature (629)..(629): Absent or Met or X
  misc_feature (630)..(630): Absent or Trp or X
  misc_feature (631)..(631): Absent or His or X
  misc_feature (632)..(632): Absent or Asp or X
  misc_feature (633)..(633): Absent or Ile or X
  misc_feature (634)..(634): Absent or Thr or X
  misc_feature (635)..(635): Absent or Arg or X
  misc_feature (636)..(636): Absent or Gln or X
  misc_feature (637)..(637): Absent or Thr or X
  misc_feature (638)..(638): Absent or Gly or X
  misc_feature (639)..(639): Absent or Gly or X
  misc_feature (640)..(640): Absent or Asn or X
  misc_feature (641)..(641): Absent or Ile or X
  misc_feature (642)..(642): Absent or Ile or X
  misc_feature (643)..(643): Absent or Ser or X
  misc_feature (644)..(644): Absent or Val or X
  misc_feature (645)..(645): Absent or Thr or X
  misc_feature (646)..(646): Absent or Ile or X
  misc_feature (647)..(647): Absent or Pro or X
  misc_feature (648)..(648): Absent or Val or X
  misc_feature (649)..(649): Absent or Met or X
  misc_feature (650)..(650): Absent or Phe or X
  misc_feature (651)..(651): Absent or Gly or X
  misc_feature (652)..(652): Absent or Arg or X
  misc_feature (653)..(653): Absent or Tyr or X
  misc_feature (654)..(654): Absent or Leu or X
  misc_feature (655)..(655): Absent or Glu or X
  misc_feature (656)..(656): Absent or Ile or X
  misc_feature (657)..(657): Absent or Pro or X
  misc_feature (658)..(658): Absent or Lys or X
  misc_feature (659)..(659): Absent or Ser or X
  misc_feature (660)..(660): Absent or Cys or X
  misc_feature (661)..(661): Absent or Asn or X
  misc_feature (662)..(662): Absent or Gly or X
  misc_feature (663)..(663): Absent or Val or X
  misc_feature (664)..(664): Absent or Ala or X
  misc_feature (665)..(665): Absent or Arg or X
  misc_feature (666)..(666): Absent or Phe or X
  misc_feature (667)..(667): Absent or Asp or X
  misc_feature (668)..(668): Absent or Phe or X
  misc_feature (669)..(669): Absent or Glu or X
  misc_feature (670)..(670): Absent or Tyr or X
  misc_feature (671)..(671): Absent or Leu or X
  misc_feature (672)..(672): Absent or Cys or X
  misc_feature (673)..(673): Absent or Gly or X
  misc_feature (674)..(674): Absent or Arg or X
  misc_feature (675)..(675): Absent or Pro or X
  misc_feature (676)..(676): Absent or Val or X
  misc_feature (677)..(677): Absent or Gly or X
  misc_feature (678)..(678): Absent or Ala or X
  misc_feature (679)..(679): Absent or Ala or X
  misc_feature (680)..(680): Absent or Asp or X
  misc_feature (681)..(681): Absent or Tyr or X
  misc_feature (682)..(682): Absent or Ile or X
  misc_feature (683)..(683): Absent or Ala or X
  misc_feature (684)..(684): Absent or Ile or X
  misc_feature (685)..(685): Absent or Ala or X
  misc_feature (686)..(686): Absent or Arg or X
  misc_feature (687)..(687): Absent or Asn or X
  misc_feature (688)..(688): Absent or Tyr or X
  misc_feature (689)..(689): Absent or His or X
  misc_feature (690)..(690): Absent or Thr or X
  misc_feature (691)..(691): Absent or Ile or X
  misc_feature (692)..(692): Absent or Phe or X
  misc_feature (693)..(693): Absent or Ile or X
  misc_feature (694)..(694): Absent or Ser or X
  misc_feature (695)..(695): Absent or Asp or X
  misc_feature (696)..(696): Absent or Ile or X
  misc_feature (697)..(697): Absent or Pro or X
  misc_feature (698)..(698): Absent or Ala or X
  misc_feature (699)..(699): Absent or Met or X
  misc_feature (700)..(700): Absent or Ser or X
  misc_feature (701)..(701): Absent or Met or X
  misc_feature (702)..(702): Absent or Lys or X
  misc_feature (703)..(703): Absent or Ile or X
  misc_feature (704)..(704): Absent or Arg or X
  misc_feature (705)..(705): Absent or Asp or X
  misc_feature (706)..(706): Absent or Lys or X
  misc_feature (707)..(707): Absent or Ala or X
  misc_feature (708)..(708): Absent or Arg or X
  misc_feature (709)..(709): Absent or Arg or X
  misc_feature (710)..(710): Absent or Phe or X
  misc_feature (711)..(711): Absent or Ile or X
  misc_feature (712)..(712): Absent or Thr or X
  misc_feature (713)..(713): Absent or Leu or X
  misc_feature (714)..(714): Absent or Ile or X
  misc_feature (715)..(715): Absent or Asp or X
  misc_feature (716)..(716): Absent or Glu or X
  misc_feature (717)..(717): Absent or Leu or X
  misc_feature (718)..(718): Absent or Tyr or X
  misc_feature (719)..(719): Absent or Asn or X
  misc_feature (720)..(720): Absent or His or X
  misc_feature (721)..(721): Absent or His or X
  misc_feature (722)..(722): Absent or Cys or X
  misc_feature (723)..(723): Absent or Arg or X
  misc_feature (724)..(724): Absent or Leu or X
  misc_feature (725)..(725): Absent or Val or X
  misc_feature (726)..(726): Absent or Cys or X
  misc_feature (727)..(727): Absent or Leu or X
  misc_feature (728)..(728): Absent or Ala or X
  misc_feature (729)..(729): Absent or Ala or X
  misc_feature (730)..(730): Absent or Ser or X
  misc_feature (731)..(731): Absent or Ser or X
  misc_feature (732)..(732): Absent or Ile or X
  misc_feature (733)..(733): Absent or Asp or X
  misc_feature (734)..(734): Absent or Asp or X
  misc_feature (735)..(735): Absent or Leu or X
  misc_feature (736)..(736): Absent or Phe or X
  misc_feature (737)..(737): Absent or Gln or X
  misc_feature (738)..(738): Absent or Gly or X
  misc_feature (739)..(739): Absent or Thr or X
  misc_feature (740)..(740): Absent or Asp or X
  misc_feature (741)..(741): Absent or Glu or X
  misc_feature (742)..(742): Absent or Gly or X
  misc_feature (743)..(743): Absent or Pro or X
  misc_feature (744)..(744): Absent or Leu or X
  misc_feature (745)..(745): Absent or Phe or X
  misc_feature (746)..(746): Absent or Asp or X
  misc_feature (747)..(747): Absent or Leu or X
  misc_feature (748)..(748): Absent or Glu or X
  misc_feature (749)..(749): Absent or Ser or X
  misc_feature (750)..(750): Absent or Phe or X
  misc_feature (751)..(751): Absent or Gln or X
  misc_feature (752)..(752): Absent or Phe or X
  misc_feature (753)..(753): Absent or Glu or X
  misc_feature (754)..(754): Absent or Gly or X
  misc_feature (755)..(755): Absent or Glu or X
  misc_feature (756)..(756): Absent or Ala or X
  misc_feature (757)..(757): Absent or Glu or X
  misc_feature (758)..(758): Absent or Gly or X
  misc_feature (759)..(759): Absent or Ala or X
  misc_feature (760)..(760): Absent or Lys or X
  misc_feature (761)..(761): Absent or Leu or X
  misc_feature (762)..(762): Absent or Arg or X
  misc_feature (763)..(763): Absent or Arg or X
  misc_feature (764)..(764): Absent or Asp or X
  misc_feature (765)..(765): Absent or Val or X
  misc_feature (766)..(766): Absent or Leu or X
  misc_feature (767)..(767): Absent or Ala or X
  misc_feature (768)..(768): Absent or Glu or X
  misc_feature (769)..(769): Absent or Gly or X
  misc_feature (770)..(770): Absent or Asn or X
  misc_feature (771)..(771): Absent or Val or X
  misc_feature (772)..(772): Absent or Gly or X
  misc_feature (773)..(773): Absent or Ala or X
  misc_feature (774)..(774): Absent or Ala or X
  misc_feature (775)..(775): Absent or Pro or X
  misc_feature (776)..(776): Absent or Ser or X
  misc_feature (777)..(777): Absent or Pro or X
  misc_feature (778)..(778): Absent or Thr or X
  misc_feature (779)..(779): Absent or Gly or X
  misc_feature (780)..(780): Absent or Leu or X
  misc_feature (781)..(781): Absent or Val or X
  misc_feature (782)..(782): Absent or Ala or X
  misc_feature (783)..(783): Absent or Ile or X
  misc_feature (784)..(784): Absent or Leu or X
  misc_feature (785)..(785): Absent or Ser or X
  misc_feature (786)..(786): Absent or Gly or X
  misc_feature (787)..(787): Absent or Gln or X
  misc_feature (788)..(788): Absent or Glu or X
  misc_feature (789)..(789): Absent or Glu or X
  misc_feature (790)..(790): Absent or Met or X
  misc_feature (791)..(791): Absent or Phe or X
  misc_feature (792)..(792): Absent or Ala or X
  misc_feature (793)..(793): Absent or Phe or X
  misc_feature (794)..(794): Absent or Arg or X
  misc_feature (795)..(795): Absent or Arg or X
  misc_feature (796)..(796): Absent or Ala or X
  misc_feature (797)..(797): Absent or Ile or X
  misc_feature (798)..(798): Absent or Ser or X
  misc_feature (799)..(799): Absent or Arg or X
  misc_feature (800)..(800): Absent or Leu or X
  misc_feature (801)..(801): Absent or Ile or X
  misc_feature (802)..(802): Absent or Glu or X
  misc_feature (803)..(803): Absent or Met or X
  misc_feature (804)..(804): Absent or Gln or X
  misc_feature (805)..(805): Absent or Thr or X
  misc_feature (806)..(806): Absent or Ser or X
  misc_feature (807)..(807): Absent or Leu or X
  misc_feature (808)..(808): Absent or Tyr or X
  misc_feature (809)..(809): Absent or Leu or X
  misc_feature (810)..(810): Absent or Glu or X
  misc_feature (811)..(811): Absent or Arg or X
  misc_feature (812)..(812): Absent or Val or X
  misc_feature (813)..(813): Absent or Glu or X
  misc_feature (814)..(814): Absent or Arg or X
  misc_feature (815)..(815): Absent or Val or X
  misc_feature (816)..(816): Absent or His or X
  misc_feature (817)..(817): Absent or Ser or X
  misc_feature (818)..(818): Absent or Ser or X
  misc_feature (819)..(819): Absent or Leu or X
  misc_feature (820)..(820): Absent or Gln or X
  misc_feature (821)..(821): Absent or Gln or X
  misc_feature (822)..(822): Absent or Gln or X
  misc_feature (823)..(823): Absent or Ser or X
  misc_feature (824)..(824): Absent or Ser or X
  misc_feature (825)..(825): Absent or Val or X
  misc_feature (826)..(826): Absent or Leu or X
  misc_feature (827)..(827): Absent or Thr or X
  misc_feature (828)..(828): Absent or Lys or X
  misc_feature (829)..(829): Absent or Ser or X
  misc_feature (830)..(830): Absent or Ser or X
  misc_feature (831)..(831): Absent or Thr or X
  misc_feature (832)..(832): Absent or Val or X
  misc_feature (833)..(833): Absent or Ser or X
  misc_feature (834)..(834): Absent or Gln or X
  misc_feature (835)..(835): Absent or Ser or X
  misc_feature (836)..(836): Absent or Ala or X
  misc_feature (837)..(837): Absent or Pro or X
  misc_feature (838)..(838): Absent or Ser or X
  misc_feature (839)..(839): Absent or Val or X
  misc_feature (840)..(840): Absent or X
  misc_feature (841)..(841): Absent or X
  misc_feature (842)..(842): Absent or X
  misc_feature (843)..(843): Absent or X
  misc_feature (844)..(844): Absent or X
  misc_feature (845)..(845): Absent or X
  misc_feature (846)..(846): Absent or X
  misc_feature (847)..(847): Absent or X
  misc_feature (848)..(848): Absent or X
  misc_feature (849)..(849): Absent or X
  misc_feature (850)..(850): Absent or X
  misc_feature (851)..(851): Absent or X
  misc_feature (852)..(852): Absent or X
  misc_feature (853)..(853): Absent or X
  misc_feature (854)..(854): Absent or X
  misc_feature (855)..(855): Absent or X
  misc_feature (856)..(856): Absent or X
  misc_feature (857)..(857): Absent or X
  misc_feature (858)..(858): Absent or X
  misc_feature (859)..(859): Absent or X
  misc_feature (860)..(860): Absent or X
  misc_feature (861)..(861): Absent or X
  misc_feature (862)..(862): Absent or X
  misc_feature (863)..(863): Absent or X
  misc_feature (864)..(864): Absent or X
  misc_feature (865)..(865): Absent or X
  misc_feature (866)..(866): Absent or X
  misc_feature (867)..(867): Absent or X
  misc_feature (868)..(868): Absent or X
  misc_feature (869)..(869): Absent or X
  misc_feature (870)..(870): Absent or X
  misc_feature (871)..(871): Absent or X
  misc_feature (872)..(872): Absent or X
  misc_feature (873)..(873): Absent or X
  misc_feature (874)..(874): Absent or X
  misc_feature (875)..(875): Absent or X
  misc_feature (876)..(876): Absent or X
  misc_feature (877)..(877): Absent or X
  misc_feature (878)..(878): Absent or X
  misc_feature (879)..(879): Absent or X
  misc_feature (880)..(880): Absent or X
  misc_feature (881)..(881): Absent or X
  misc_feature (882)..(882): Absent or X
  misc_feature (883)..(883): Absent or X
  misc_feature (884)..(884): Absent or X
  misc_feature (885)..(885): Absent or X
  misc_feature (886)..(886): Absent or X
  misc_feature (887)..(887): Absent or X
  misc_feature (888)..(888): Absent or X
  misc_feature (889)..(889): Absent or X
  misc_feature (890)..(890): Absent or X
  misc_feature (891)..(891): Absent or X
  misc_feature (892)..(892): Absent or X
  misc_feature (893)..(893): Absent or X
  misc_feature (894)..(894): Absent or X
  misc_feature (895)..(895): Absent or X
  misc_feature (896)..(896): Absent or X
  misc_feature (897)..(897): Absent or X
  misc_feature (898)..(898): Absent or X
  misc_feature (899)..(899): Absent or X
  misc_feature (900)..(900): Absent or X
  misc_feature (901)..(901): Absent or X
  misc_feature (902)..(902): Absent or X
  misc_feature (903)..(903): Absent or X
  misc_feature (904)..(904): Absent or X
  misc_feature (905)..(905): Absent or X
  misc_feature (906)..(906): Absent or X
  misc_feature (907)..(907): Absent or X
  misc_feature (908)..(908): Absent or X
  misc_feature (909)..(909): Absent or X
  misc_feature (910)..(910): Absent or X
  misc_feature (911)..(911): Absent or X
  misc_feature (912)..(912): Absent or X
  misc_feature (913)..(913): Absent or X
  misc_feature (914)..(914): Absent or X
  misc_feature (915)..(915): Absent or X
  misc_feature (916)..(916): Absent or X
  misc_feature (917)..(917): Absent or X
  misc_feature (918)..(918): Absent or X
  misc_feature (919)..(919): Absent or X
  misc_feature (920)..(920): Absent or X
  misc_feature (921)..(921): Absent or X
  misc_feature (922)..(922): Absent or X
  misc_feature (923)..(923): Absent or X
  misc_feature (924)..(924): Absent or X
  misc_feature (925)..(925): Absent or X
  misc_feature (926)..(926): Absent or X
  misc_feature (927)..(927): Absent or X
  misc_feature (928)..(928): Absent or X
  misc_feature (929)..(929): Absent or X
  misc_feature (930)..(930): Absent or X
  misc_feature (931)..(931): Absent or X
  misc_feature (932)..(932): Absent or X
  misc_feature (933)..(933): Absent or X
  misc_feature (934)..(934): Absent or X
  misc_feature (935)..(935): Absent or X
  misc_feature (936)..(936): Absent or X
  misc_feature (937)..(937): Absent or X
  misc_feature (938)..(938): Absent or X
  misc_feature (939)..(939): Absent or X
  misc_feature (940)..(940): Absent or X
  misc_feature (941)..(941): Absent or X
  misc_feature (942)..(942): Absent or X
  misc_feature (943)..(943): Absent or X
  misc_feature (944)..(944): Absent or X
  misc_feature (945)..(945): Absent or X
  misc_feature (946)..(946): Absent or X
  misc_feature (947)..(947): Absent or X
  misc_feature (948)..(948): Absent or X
  misc_feature (949)..(949): Absent or X
  misc_feature (950)..(950): Absent or X
  misc_feature (951)..(951): Absent or X
  misc_feature (952)..(952): Absent or X
  misc_feature (953)..(953): Absent or X
  misc_feature (954)..(954): Absent or X
  misc_feature (955)..(955): Absent or X
  misc_feature (956)..(956): Absent or X
  misc_feature (957)..(957): Absent or X
  misc_feature (958)..(958): Absent or X
  misc_feature (959)..(959): Absent or X
  misc_feature (960)..(960): Absent or X
  misc_feature (961)..(961): Absent or X
  misc_feature (962)..(962): Absent or X
  misc_feature (963)..(963): Absent or X
  misc_feature (964)..(964): Absent or X
  misc_feature (965)..(965): Absent or X
  misc_feature (966)..(966): Absent or X
  misc_feature (967)..(967): Absent or X
  misc_feature (968)..(968): Absent or X
  misc_feature (969)..(969): Absent or X
  misc_feature (970)..(970): Absent or X
  misc_feature (971)..(971): Absent or X
  misc_feature (972)..(972): Absent or X
  misc_feature (973)..(973): Absent or X
  misc_feature (974)..(974): Absent or X
  misc_feature (975)..(975): Absent or X
  misc_feature (976)..(976): Absent or X
  misc_feature (977)..(977): Absent or X
  misc_feature (978)..(978): Absent or X
  misc_feature (979)..(979): Absent or X
  misc_feature (980)..(980): Absent or X
  misc_feature (981)..(981): Absent or X
  misc_feature (982)..(982): Absent or X
  misc_feature (983)..(983): Absent or X
  misc_feature (984)..(984): Absent or X
  misc_feature (985)..(985): Absent or X
  misc_feature (986)..(986): Absent or X
  misc_feature (987)..(987): Absent or X
  misc_feature (988)..(988): Absent or X
  misc_feature (989)..(989): Absent or X
  misc_feature (990)..(990): Absent or X
  misc_feature (991)..(991): Absent or X
  misc_feature (992)..(992): Absent or X
  misc_feature (993)..(993): Absent or X
  misc_feature (994)..(994): Absent or X
  misc_feature (995)..(995): Absent or X
  misc_feature (996)..(996): Absent or X
  misc_feature (997)..(997): Absent or X
  misc_feature (998)..(998): Absent or X
  misc_feature (999)..(999): Absent or X
  misc_feature (1000)..(1000): Absent or X
  misc_feature (1001)..(1001): Absent or X
  misc_feature (1002)..(1002): Absent or X
  misc_feature (1003)..(1003): Absent or X
  misc_feature (1004)..(1004): Absent or X
  misc_feature (1005)..(1005): Absent or X
  misc_feature (1006)..(1006): Absent or X
  misc_feature (1007)..(1007): Absent or X
  misc_feature (1008)..(1008): Absent or X
  misc_feature (1009)..(1009): Absent or X
  misc_feature (1010)..(1010): Absent or X
  misc_feature (1011)..(1011): Absent or X
  misc_feature (1012)..(1012): Absent or X
  misc_feature (1013)..(1013): Absent or X
  misc_feature (1014)..(1014): Absent or X
  misc_feature (1015)..(1015): Absent or X
  misc_feature (1016)..(1016): Absent or X
  misc_feature (1017)..(1017): Absent or X
  misc_feature (1018)..(1018): Absent or X
  misc_feature (1019)..(1019): Absent or X
  misc_feature (1020)..(1020): Absent or X
  misc_feature (1021)..(1021): Absent or X
  misc_feature (1022)..(1022): Absent or X
  misc_feature (1023)..(1023): Absent or X
  misc_feature (1024)..(1024): Absent or X
  misc_feature (1025)..(1025): Absent or X
  misc_feature (1026)..(1026): Absent or X
  misc_feature (1027)..(1027): Absent or X
  misc_feature (1028)..(1028): Absent or X
  misc_feature (1029)..(1029): Absent or X
  misc_feature (1030)..(1030): Absent or X
  misc_feature (1031)..(1031): Absent or X
  misc_feature (1032)..(1032): Absent or X
  misc_feature (1033)..(1033): Absent or X
  misc_feature (1034)..(1034): Absent or X
  misc_feature (1035)..(1035): Absent or X
  misc_feature (1036)..(1036): Absent or X
  misc_feature (1037)..(1037): Absent or X
  misc_feature (1038)..(1038): Absent or X
  misc_feature (1039)..(1039): Absent or X
  misc_feature (1040)..(1040): Absent or X
  misc_feature (1041)..(1041): Absent or X
  misc_feature (1042)..(1042): Absent or X
  misc_feature (1043)..(1043): Absent or X
  misc_feature (1044)..(1044): Absent or X
  misc_feature (1045)..(1045): Absent or X
  misc_feature (1046)..(1046): Absent or X
  misc_feature (1047)..(1047): Absent or X
  misc_feature (1048)..(1048): Absent or X
  misc_feature (1049)..(1049): Absent or X
  misc_feature (1050)..(1050): Absent or X
  misc_feature (1051)..(1051): Absent or X
  misc_feature (1052)..(1052): Absent or X
  misc_feature (1053)..(1053): Absent or X
  misc_feature (1054)..(1054): Absent or X
  misc_feature (1055)..(1055): Absent or X
  misc_feature (1056)..(1056): Absent or X
  misc_feature (1057)..(1057): Absent or X
  misc_feature (1058)..(1058): Absent or X
  misc_feature (1059)..(1059): Absent or X
  misc_feature (1060)..(1060): Absent or X
  misc_feature (1061)..(1061): Absent or X
  misc_feature (1062)..(1062): Absent or X
  misc_feature (1063)..(1063): Absent or X
  misc_feature (1064)..(1064): Absent or X
  misc_feature (1065)..(1065): Absent or X
  misc_feature (1066)..(1066): Absent or X
  misc_feature (1067)..(1067): Absent or X
  misc_feature (1068)..(1068): Absent or X
  misc_feature (1069)..(1069): Absent or X
  misc_feature (1070)..(1070): Absent or X
  misc_feature (1071)..(1071): Absent or X
  misc_feature (1072)..(1072): Absent or X
  misc_feature (1073)..(1073): Absent or X
  misc_feature (1074)..(1074): Absent or X
  misc_feature (1075)..(1075): Absent or X
  misc_feature (1076)..(1076): Absent or X
  misc_feature (1077)..(1077): Absent or X
  misc_feature (1078)..(1078): Absent or X
  misc_feature (1079)..(1079): Absent or X
  misc_feature (1080)..(1080): Absent or X
  misc_feature (1081)..(1081): Absent or X
  misc_feature (1082)..(1082): Absent or X
  misc_feature (1083)..(1083): Absent or X
  misc_feature (1084)..(1084): Absent or X
  misc_feature (1085)..(1085): Absent or X
  misc_feature (1086)..(1086): Absent or X
  misc_feature (1087)..(1087): Absent or X
  misc_feature (1088)..(1088): Absent or X
  misc_feature (1089)..(1089): Absent or X
  misc_feature (1090)..(1090): Absent or X
  misc_feature (1091)..(1091): Absent or X
  misc_feature (1092)..(1092): Absent or X
  misc_feature (1093)..(1093): Absent or X
  misc_feature (1094)..(1094): Absent or X
  misc_feature (1095)..(1095): Absent or X
  misc_feature (1096)..(1096): Absent or X
  misc_feature (1097)..(1097): Absent or X
  misc_feature (1098)..(1098): Absent or X
  misc_feature (1099)..(1099): Absent or X
  misc_feature (1100)..(1100): Absent or X
  misc_feature (1101)..(1101): Absent or X
  misc_feature (1102)..(1102): Absent or X
  misc_feature (1103)..(1103): Absent or X
  misc_feature (1104)..(1104): Absent or X
  misc_feature (1105)..(1105): Absent or X
  misc_feature (1106)..(1106): Absent or X
  misc_feature (1107)..(1107): Absent or X
  misc_feature (1108)..(1108): Absent or X
  misc_feature (1109)..(1109): Absent or X
  misc_feature (1110)..(1110): Absent or X
  misc_feature (1111)..(1111): Absent or X
  misc_feature (1112)..(1112): Absent or X
  misc_feature (1113)..(1113): Absent or X
  misc_feature (1114)..(1114): Absent or X
  misc_feature (1115)..(1115): Absent or X
  misc_feature (1116)..(1116): Absent or X
  misc_feature (1117)..(1117): Absent or X
  misc_feature (1118)..(1118): Absent or X
  misc_feature (1119)..(1119): Absent or X
  misc_feature (1120)..(1120): Absent or X
  misc_feature (1121)..(1121): Absent or X
  misc_feature (1122)..(1122): Absent or X
  misc_feature (1123)..(1123): Absent or X
  misc_feature (1124)..(1124): Absent or X
  misc_feature (1125)..(1125): Absent or X
  misc_feature (1126)..(1126): Absent or X
  misc_feature (1127)..(1127): Absent or X
  misc_feature (1128)..(1128): Absent or X
  misc_feature (1129)..(1129): Absent or X
  misc_feature (1130)..(1130): Absent or X
  misc_feature (1131)..(1131): Absent or X
  misc_feature (1132)..(1132): Absent or X
  misc_feature (1133)..(1133): Absent or X
  misc_feature (1134)..(1134): Absent or X
  misc_feature (1135)..(1135): Absent or X
  misc_feature (1136)..(1136): Absent or X
  misc_feature (1137)..(1137): Absent or X
  misc_feature (1138)..(1138): Absent or X
  misc_feature (1139)..(1139): Absent or X
  misc_feature (1140)..(1140): Absent or X
  misc_feature (1141)..(1141): Absent or X
  misc_feature (1142)..(1142): Absent or X
  misc_feature (1143)..(1143): Absent or X
  misc_feature (1144)..(1144): Absent or X
  misc_feature (1145)..(1145): Absent or X
  misc_feature (1146)..(1146): Absent or X
  misc_feature (1147)..(1147): Absent or X
  misc_feature (1148)..(1148): Absent or X
  misc_feature (1149)..(1149): Absent or X
  misc_feature (1150)..(1150): Absent or X
  misc_feature (1151)..(1151): Absent or X
  misc_feature (1152)..(1152): Absent or X
  misc_feature (1153)..(1153): Absent or X
  misc_feature (1154)..(1154): Absent or X
  misc_feature (1155)..(1155): Absent or X
  misc_feature (1156)..(1156): Absent or X
  misc_feature (1157)..(1157): Absent or X
  misc_feature (1158)..(1158): Absent or X
  misc_feature (1159)..(1159): Absent or X
  misc_feature (1160)..(1160): Absent or X
  misc_feature (1161)..(1161): Absent or X
  misc_feature (1162)..(1162): Absent or X
  misc_feature (1163)..(1163): Absent or X
  misc_feature (1164)..(1164): Absent or X
  misc_feature (1165)..(1165): Absent or X
  misc_feature (1166)..(1166): Absent or X
  misc_feature (1167)..(1167): Absent or X
  misc_feature (1168)..(1168): Absent or X
  misc_feature (1169)..(1169): Absent or X
  misc_feature (1170)..(1170): Absent or X
  misc_feature (1171)..(1171): Absent or X
  misc_feature (1172)..(1172): Absent or X
  misc_feature (1173)..(1173): Absent or X
  misc_feature (1174)..(1174): Absent or X
  misc_feature (1175)..(1175): Absent or X
  misc_feature (1176)..(1176): Absent or X
  misc_feature (1177)..(1177): Absent or X
  misc_feature (1178)..(1178): Absent or X
  misc_feature (1179)..(1179): Absent or X
  misc_feature (1180)..(1180): Absent or X
  misc_feature (1181)..(1181): Absent or X
  misc_feature (1182)..(1182): Absent or X
  misc_feature (1183)..(1183): Absent or X
  misc_feature (1184)..(1184): Absent or X
  misc_feature (1185)..(1185): Absent or X
  misc_feature (1186)..(1186): Absent or X
  misc_feature (1187)..(1187): Absent or X
  misc_feature (1188)..(1188): Absent or X
  misc_feature (1189)..(1189): Absent or X
  misc_feature (1190)..(1190): Absent or X
  misc_feature (1191)..(1191): Absent or X
  misc_feature (1192)..(1192): Absent or X
  misc_feature (1193)..(1193): Absent or X
  misc_feature (1194)..(1194): Absent or X
  misc_feature (1195)..(1195): Absent or X
  misc_feature (1196)..(1196): Absent or X
  misc_feature (1197)..(1197): Absent or X
  misc_feature (1198)..(1198): Absent or X
  misc_feature (1199)..(1199): Absent or X
  misc_feature (1200)..(1200): Absent or X
  misc_feature (1201)..(1201): Absent or X
  misc_feature (1202)..(1202): Absent or X
  misc_feature (1203)..(1203): Absent or X
  misc_feature (1204)..(1204): Absent or X
  misc_feature (1205)..(1205): Absent or X
  misc_feature (1206)..(1206): Absent or X
  misc_feature (1207)..(1207): Absent or X
  misc_feature (1208)..(1208): Absent or X
  misc_feature (1209)..(1209): Absent or X
  misc_feature (1210)..(1210): Absent or X
  misc_feature (1211)..(1211): Absent or X
  misc_feature (1212)..(1212): Absent or X
  misc_feature (1213)..(1213): Absent or X
  misc_feature (1214)..(1214): Absent or X
  misc_feature (1215)..(1215): Absent or X
  misc_feature (1216)..(1216): Absent or X
  misc_feature (1217)..(1217): Absent or X
  misc_feature (1218)..(1218): Absent or X
  misc_feature (1219)..(1219): Absent or X
  misc_feature (1220)..(1220): Absent or X
  misc_feature (1221)..(1221): Absent or X
  misc_feature (1222)..(1222): Absent or X
  misc_feature (1223)..(1223): Absent or X
  misc_feature (1224)..(1224): Absent or X
  misc_feature (1225)..(1225): Absent or X
  misc_feature (1226)..(1226): Absent or X
  misc_feature (1227)..(1227): Absent or X
  misc_feature (1228)..(1228): Absent or X
  misc_feature (1229)..(1229): Absent or X
  misc_feature (1230)..(1230): Absent or X
  misc_feature (1231)..(1231): Absent or X
  misc_feature (1232)..(1232): Absent or X
  misc_feature (1233)..(1233): Absent or X
  misc_feature (1234)..(1234): Absent or X
  misc_feature (1235)..(1235): Absent or X
  misc_feature (1236)..(1236): Absent or X
  misc_feature (1237)..(1237): Absent or X
  misc_feature (1238)..(1238): Absent or X
  misc_feature (1239)..(1239): Absent or X
  misc_feature (1240)..(1240): Absent or X
  misc_feature (1241)..(1241): Absent or X
  misc_feature (1242)..(1242): Absent or X
  misc_feature (1243)..(1243): Absent or X
  misc_feature (1244)..(1244): Absent or X
  misc_feature (1245)..(1245): Absent or X
  misc_feature (1246)..(1246): Absent or X
  misc_feature (1247)..(1247): Absent or X
  misc_feature (1248)..(1248): Absent or X
  misc_feature (1249)..(1249): Absent or X
  misc_feature (1250)..(1250): Absent or X
  misc_feature (1251)..(1251): Absent or X
  misc_feature (1252)..(1252): Absent or X
  misc_feature (1253)..(1253): Absent or X
  misc_feature (1254)..(1254): Absent or X
  misc_feature (1255)..(1255): Absent or X
  misc_feature (1256)..(1256): Absent or X
  misc_feature (1257)..(1257): Absent or X
  misc_feature (1258)..(1258): Absent or X
  misc_feature (1259)..(1259): Absent or X
  misc_feature (1260)..(1260): Absent or X
  misc_feature (1261)..(1261): Absent or X
  misc_feature (1262)..(1262): Absent or X
  misc_feature (1263)..(1263): Absent or X
  misc_feature (1264)..(1264): Absent or X
  misc_feature (1265)..(1265): Absent or X
  misc_feature (1266)..(1266): Absent or X
  misc_feature (1267)..(1267): Absent or X
  misc_feature (1268)..(1268): Absent or X
  misc_feature (1269)..(1269): Absent or X
  misc_feature (1270)..(1270): Absent or X
  misc_feature (1271)..(1271): Absent or X
  misc_feature (1272)..(1272): Absent or X
  misc_feature (1273)..(1273): Absent or X
  misc_feature (1274)..(1274): Absent or X
  misc_feature (1275)..(1275): Absent or X
  misc_feature (1276)..(1276): Absent or X
  misc_feature (1277)..(1277): Absent or X
  misc_feature (1278)..(1278): Absent or X
  misc_feature (1279)..(1279): Absent or X
  misc_feature (1280)..(1280): Absent or X
  misc_feature (1281)..(1281): Absent or X
  misc_feature (1282)..(1282): Absent or X
  misc_feature (1283)..(1283): Absent or X
  misc_feature (1284)..(1284): Absent or X
  misc_feature (1285)..(1285): Absent or X
  misc_feature (1286)..(1286): Absent or X
  misc_feature (1287)..(1287): Absent or X
  misc_feature (1288)..(1288): Absent or X
  misc_feature (1289)..(1289): Absent or X
  misc_feature (1290)..(1290): Absent or X
  misc_feature (1291)..(1291): Absent or X
  misc_feature (1292)..(1292): Absent or X
  misc_feature (1293)..(1293): Absent or X
  misc_feature (1294)..(1294): Absent or X
  misc_feature (1295)..(1295): Absent or X
  misc_feature (1296)..(1296): Absent or X
  misc_feature (1297)..(1297): Absent or X
  misc_feature (1298)..(1298): Absent or X
  misc_feature (1299)..(1299): Absent or X
  misc_feature (1300)..(1300): Absent or X
  misc_feature (1301)..(1301): Absent or X
  misc_feature (1302)..(1302): Absent or X
  misc_feature (1303)..(1303): Absent or X
  misc_feature (1304)..(1304): Absent or X
  misc_feature (1305)..(1305): Absent or X
  misc_feature (1306)..(1306): Absent or X
  misc_feature (1307)..(1307): Absent or X
  misc_feature (1308)..(1308): Absent or X
  misc_feature (1309)..(1309): Absent or X
  misc_feature (1310)..(1310): Absent or X
  misc_feature (1311)..(1311): Absent or X
  misc_feature (1312)..(1312): Absent or X
  misc_feature (1313)..(1313): Absent or X
  misc_feature (1314)..(1314): Absent or X
  misc_feature (1315)..(1315): Absent or X
  misc_feature (1316)..(1316): Absent or X
  misc_feature (1317)..(1317): Absent or X
  misc_feature (1318)..(1318): Absent or X
  misc_feature (1319)..(1319): Absent or X
  misc_feature (1320)..(1320): Absent or X
  misc_feature (1321)..(1321): Absent or X
  misc_feature (1322)..(1322): Absent or X
  misc_feature (1323)..(1323): Absent or X
  misc_feature (1324)..(1324): Absent or X
  misc_feature (1325)..(1325): Absent or X
  misc_feature (1326)..(1326): Absent or X
  misc_feature (1327)..(1327): Absent or X
  misc_feature (1328)..(1328): Absent or X
  misc_feature (1329)..(1329): Absent or X
  misc_feature (1330)..(1330): Absent or X
  misc_feature (1331)..(1331): Absent or X
  misc_feature (1332)..(1332): Absent or X
  misc_feature (1333)..(1333): Absent or X
  misc_feature (1334)..(1334): Absent or X
  misc_feature (1335)..(1335): Absent or X
  misc_feature (1336)..(1336): Absent or X
  misc_feature (1337)..(1337): Absent or X
  misc_feature (1338)..(1338): Absent or X
  misc_feature (1339)..(1339): Absent or X
  misc_feature (1340)..(1340): Absent or X
  misc_feature (1341)..(1341): Absent or X
  misc_feature (1342)..(1342): Absent or X
  misc_feature (1343)..(1343): Absent or X
  misc_feature (1344)..(1344): Absent or X
  misc_feature (1345)..(1345): Absent or X
  misc_feature (1346)..(1346): Absent or X
  misc_feature (1347)..(1347): Absent or X
  misc_feature (1348)..(1348): Absent or X
  misc_feature (1349)..(1349): Absent or X
  misc_feature (1350)..(1350): Absent or X
  misc_feature (1351)..(1351): Absent or X
  misc_feature (1352)..(1352): Absent or X
  misc_feature (1353)..(1353): Absent or X
  misc_feature (1354)..(1354): Absent or X
  misc_feature (1355)..(1355): Absent or X
  misc_feature (1356)..(1356): Absent or X
  misc_feature (1357)..(1357): Absent or X
  misc_feature (1358)..(1358): Absent or X
  misc_feature (1359)..(1359): Absent or X
  misc_feature (1360)..(1360): Absent or X
  misc_feature (1361)..(1361): Absent or X
  misc_feature (1362)..(1362): Absent or X
  misc_feature (1363)..(1363): Absent or X
  misc_feature (1364)..(1364): Absent or X
  misc_feature (1365)..(1365): Absent or X
  misc_feature (1366)..(1366): Absent or X
  misc_feature (1367)..(1367): Absent or X
  misc_feature (1368)..(1368): Absent or X
  misc_feature (1369)..(1369): Absent or X
  misc_feature (1370)..(1370): Absent or X
  misc_feature (1371)..(1371): Absent or X
  misc_feature (1372)..(1372): Absent or X
  misc_feature (1373)..(1373): Absent or X
  misc_feature (1374)..(1374): Absent or X
  misc_feature (1375)..(1375): Absent or X
  misc_feature (1376)..(1376): Absent or X
  misc_feature (1377)..(1377): Absent or X
  misc_feature (1378)..(1378): Absent or X
  misc_feature (1379)..(1379): Absent or X
  misc_feature (1380)..(1380): Absent or X
  misc_feature (1381)..(1381): Absent or X
  misc_feature (1382)..(1382): Absent or X
  misc_feature (1383)..(1383): Absent or X
  misc_feature (1384)..(1384): Absent or X
  misc_feature (1385)..(1385): Absent or X
  misc_feature (1386)..(1386): Absent or X
  misc_feature (1387)..(1387): Absent or X
  misc_feature (1388)..(1388): Absent or X
  misc_feature (1389)..(1389): Absent or X
  misc_feature (1390)..(1390): Absent or X
  misc_feature (1391)..(1391): Absent or X
  misc_feature (1392)..(1392): Absent or X
  misc_feature (1393)..(1393): Absent or X
  misc_feature (1394)..(1394): Absent or X
  misc_feature (1395)..(1395): Absent or X
  misc_feature (1396)..(1396): Absent or X
  misc_feature (1397)..(1397): Absent or X
  misc_feature (1398)..(1398): Absent or X
  misc_feature (1399)..(1399): Absent or X
  misc_feature (1400)..(1400): Absent or X
  misc_feature (1401)..(1401): Absent or X
  misc_feature (1402)..(1402): Absent or X
  misc_feature (1403)..(1403): Absent or X
  misc_feature (1404)..(1404): Absent or X
  misc_feature (1405)..(1405): Absent or X
  misc_feature (1406)..(1406): Absent or X
  misc_feature (1407)..(1407): Absent or X
  misc_feature (1408)..(1408): Absent or X
  misc_feature (1409)..(1409): Absent or X
  misc_feature (1410)..(1410): Absent or X
  misc_feature (1411)..(1411): Absent or X
  misc_feature (1412)..(1412): Absent or X
  misc_feature (1413)..(1413): Absent or X
  misc_feature (1414)..(1414): Absent or X
  misc_feature (1415)..(1415): Absent or X
  misc_feature (1416)..(1416): Absent or X
  misc_feature (1417)..(1417): Absent or X
  misc_feature (1418)..(1418): Absent or X
  misc_feature (1419)..(1419): Absent or X
  misc_feature (1420)..(1420): Absent or X
  misc_feature (1421)..(1421): Absent or X
  misc_feature (1422)..(1422): Absent or X
  misc_feature (1423)..(1423): Absent or X
  misc_feature (1424)..(1424): Absent or X
  misc_feature (1425)..(1425): Absent or X
  misc_feature (1426)..(1426): Absent or X
  misc_feature (1427)..(1427): Absent or X
  misc_feature (1428)..(1428): Absent or X
  misc_feature (1429)..(1429): Absent or X
  misc_feature (1430)..(1430): Absent or X
  misc_feature (1431)..(1431): Absent or X
  misc_feature (1432)..(1432): Absent or X
  misc_feature (1433)..(1433): Absent or X
  misc_feature (1434)..(1434): Absent or X
  misc_feature (1435)..(1435): Absent or X
  misc_feature (1436)..(1436): Absent or X
  misc_feature (1437)..(1437): Absent or X
  misc_feature (1438)..(1438): Absent or X
  misc_feature (1439)..(1439): Absent or X
  misc_feature (1440)..(1440): Absent or X
  misc_feature (1441)..(1441): Absent or X
  misc_feature (1442)..(1442): Absent or X
  misc_feature (1443)..(1443): Absent or X
  misc_feature (1444)..(1444): Absent or X
  misc_feature (1445)..(1445): Absent or X
  misc_feature (1446)..(1446): Absent or X
  misc_feature (1447)..(1447): Absent or X
  misc_feature (1448)..(1448): Absent or X
  misc_feature (1449)..(1449): Absent or X
  misc_feature (1450)..(1450): Absent or X
  misc_feature (1451)..(1451): Absent or X
  misc_feature (1452)..(1452): Absent or X
  misc_feature (1453)..(1453): Absent or X
  misc_feature (1454)..(1454): Absent or X
  misc_feature (1455)..(1455): Absent or X
  misc_feature (1456)..(1456): Absent or X
  misc_feature (1457)..(1457): Absent or X
  misc_feature (1458)..(1458): Absent or X
  misc_feature (1459)..(1459): Absent or X
  misc_feature (1460)..(1460): Absent or X
  misc_feature (1461)..(1461): Absent or X
  misc_feature (1462)..(1462): Absent or X
  misc_feature (1463)..(1463): Absent or X
  misc_feature (1464)..(1464): Absent or X
  misc_feature (1465)..(1465): Absent or X
  misc_feature (1466)..(1466): Absent or X
  misc_feature (1467)..(1467): Absent or X
  misc_feature (1468)..(1468): Absent or X
  misc_feature (1469)..(1469): Absent or X
  misc_feature (1470)..(1470): Absent or X
  misc_feature (1471)..(1471): Absent or X
  misc_feature (1472)..(1472): Absent or X
  misc_feature (1473)..(1473): Absent or X
  misc_feature (1474)..(1474): Absent or X
  misc_feature (1475)..(1475): Absent or X
  misc_feature (1476)..(1476): Absent or X
  misc_feature (1477)..(1477): Absent or X
  misc_feature (1478)..(1478): Absent or X
  misc_feature (1479)..(1479): Absent or X
  misc_feature (1480)..(1480): Absent or X
  misc_feature (1481)..(1481): Absent or X
  misc_feature (1482)..(1482): Absent or X
  misc_feature (1483)..(1483): Absent or X
  misc_feature (1484)..(1484): Absent or X
  misc_feature (1485)..(1485): Absent or X
  misc_feature (1486)..(1486): Absent or X
  misc_feature (1487)..(1487): Absent or X
  misc_feature (1488)..(1488): Absent or X
  misc_feature (1489)..(1489): Absent or X
  misc_feature (1490)..(1490): Absent or X
  misc_feature (1491)..(1491): Absent or X
  misc_feature (1492)..(1492): Absent or X
  misc_feature (1493)..(1493): Absent or X
  misc_feature (1494)..(1494): Absent or X
  misc_feature (1495)..(1495): Absent or X
  misc_feature (1496)..(1496): Absent or X
  misc_feature (1497)..(1497): Absent or X
  misc_feature (1498)..(1498): Absent or X
  misc_feature (1499)..(1499): Absent or X
  misc_feature (1500)..(1500): Absent or X
  misc_feature (1501)..(1501): Absent or X
  misc_feature (1502)..(1502): Absent or X
  misc_feature (1503)..(1503): Absent or X
  misc_feature (1504)..(1504): Absent or X
  misc_feature (1505)..(1505): Absent or X
  misc_feature (1506)..(1506): Absent or X
  misc_feature (1507)..(1507): Absent or X
  misc_feature (1508)..(1508): Absent or X
  misc_feature (1509)..(1509): Absent or X
  misc_feature (1510)..(1510): Absent or X
  misc_feature (1511)..(1511): Absent or X
  misc_feature (1512)..(1512): Absent or X
  misc_feature (1513)..(1513): Absent or X
  misc_feature (1514)..(1514): Absent or X
  misc_feature (1515)..(1515): Absent or X
  misc_feature (1516)..(1516): Absent or X
  misc_feature (1517)..(1517): Absent or X
  misc_feature (1518)..(1518): Absent or X
  misc_feature (1519)..(1519): Absent or X
  misc_feature (1520)..(1520): Absent or X
  misc_feature (1521)..(1521): Absent or X
  misc_feature (1522)..(1522): Absent or X
  misc_feature (1523)..(1523): Absent or X
  misc_feature (1524)..(1524): Absent or X
  misc_feature (1525)..(1525): Absent or X
  misc_feature (1526)..(1526): Absent or X
  misc_feature (1527)..(1527): Absent or X
  misc_feature (1528)..(1528): Absent or X
  misc_feature (1529)..(1529): Absent or X
  misc_feature (1530)..(1530): Absent or X
  misc_feature (1531)..(1531): Absent or X
  misc_feature (1532)..(1532): Absent or X
  misc_feature (1533)..(1533): Absent or X
  misc_feature (1534)..(1534): Absent or X
  misc_feature (1535)..(1535): Absent or X
  misc_feature (1536)..(1536): Absent or X
  misc_feature (1537)..(1537): Absent or X
  misc_feature (1538)..(1538): Absent or X
  misc_feature (1539)..(1539): Absent or X
  misc_feature (1540)..(1540): Absent or X
  misc_feature (1541)..(1541): Absent or X
  misc_feature (1542)..(1542): Absent or X
  misc_feature (1543)..(1543): Absent or X
  misc_feature (1544)..(1544): Absent or X
  misc_feature (1545)..(1545): Absent or X
  misc_feature (1546)..(1546): Absent or X
  misc_feature (1547)..(1547): Absent or X
  misc_feature (1548)..(1548): Absent or X
  misc_feature (1549)..(1549): Absent or X
  misc_feature (1550)..(1550): Absent or X
  misc_feature (1551)..(1551): Absent or X
  misc_feature (1552)..(1552): Absent or X
  misc_feature (1553)..(1553): Absent or X
  misc_feature (1554)..(1554): Absent or X
  misc_feature (1555)..(1555): Absent or X
  misc_feature (1556)..(1556): Absent or X
  misc_feature (1557)..(1557): Absent or X
  misc_feature (1558)..(1558): Absent or X
  misc_feature (1559)..(1559): Absent or X
  misc_feature (1560)..(1560): Absent or X
  misc_feature (1561)..(1561): Absent or X
  misc_feature (1562)..(1562): Absent or X
  misc_feature (1563)..(1563): Absent or X
  misc_feature (1564)..(1564): Absent or X
  misc_feature (1565)..(1565): Absent or X
  misc_feature (1566)..(1566): Absent or X
  misc_feature (1567)..(1567): Absent or X
  misc_feature (1568)..(1568): Absent or X
  misc_feature (1569)..(1569): Absent or X
  misc_feature (1570)..(1570): Absent or X
  misc_feature (1571)..(1571): Absent or X
  misc_feature (1572)..(1572): Absent or X
  misc_feature (1573)..(1573): Absent or X
  misc_feature (1574)..(1574): Absent or X
  misc_feature (1575)..(1575): Absent or X
  misc_feature (1576)..(1576): Absent or X
  misc_feature (1577)..(1577): Absent or X
  misc_feature (1578)..(1578): Absent or X
  misc_feature (1579)..(1579): Absent or X
  misc_feature (1580)..(1580): Absent or X
  misc_feature (1581)..(1581): Absent or X
  misc_feature (1582)..(1582): Absent or X
  misc_feature (1583)..(1583): Absent or X
  misc_feature (1584)..(1584): Absent or X
  misc_feature (1585)..(1585): Absent or X
  misc_feature (1586)..(1586): Absent or X
  misc_feature (1587)..(1587): Absent or X
  misc_feature (1588)..(1588): Absent or X
  misc_feature (1589)..(1589): Absent or X
  misc_feature (1590)..(1590): Absent or X
  misc_feature (1591)..(1591): Absent or X
  misc_feature (1592)..(1592): Absent or X
  misc_feature (1593)..(1593): Absent or X
  misc_feature (1594)..(1594): Absent or X
  misc_feature (1595)..(1595): Absent or X
  misc_feature (1596)..(1596): Absent or X
  misc_feature (1597)..(1597): Absent or X
  misc_feature (1598)..(1598): Absent or X
  misc_feature (1599)..(1599): Absent or X
  misc_feature (1600)..(1600): Absent or X
  misc_feature (1601)..(1601): Absent or X
  misc_feature (1602)..(1602): Absent or X
  misc_feature (1603)..(1603): Absent or X
  misc_feature (1604)..(1604): Absent or X
  misc_feature (1605)..(1605): Absent or X
  misc_feature (1606)..(1606): Absent or X
  misc_feature (1607)..(1607): Absent or X
  misc_feature (1608)..(1608): Absent or X
  misc_feature (1609)..(1609): Absent or X
  misc_feature (1610)..(1610): Absent or X
  misc_feature (1611)..(1611): Absent or X
  misc_feature (1612)..(1612): Absent or X
  misc_feature (1613)..(1613): Absent or X
  misc_feature (1614)..(1614): Absent or X
  misc_feature (1615)..(1615): Absent or X
  misc_feature (1616)..(1616): Absent or X
  misc_feature (1617)..(1617): Absent or X
  misc_feature (1618)..(1618): Absent or X
  misc_feature (1619)..(1619): Absent or X
  misc_feature (1620)..(1620): Absent or X
  misc_feature (1621)..(1621): Absent or X
  misc_feature (1622)..(1622): Absent or X
  misc_feature (1623)..(1623): Absent or X
  misc_feature (1624)..(1624): Absent or X
  misc_feature (1625)..(1625): Absent or X
  misc_feature (1626)..(1626): Absent or X
  misc_feature (1627)..(1627): Absent or X
  misc_feature (1628)..(1628): Absent or X
  misc_feature (1629)..(1629): Absent or X
  misc_feature (1630)..(1630): Absent or X
  misc_feature (1631)..(1631): Absent or X
  misc_feature (1632)..(1632): Absent or X
  misc_feature (1633)..(1633): Absent or X
  misc_feature (1634)..(1634): Absent or X
  misc_feature (1635)..(1635): Absent or X
  misc_feature (1636)..(1636): Absent or X
  misc_feature (1637)..(1637): Absent or X
  misc_feature (1638)..(1638): Absent or X
  misc_feature (1639)..(1639): Absent or X
  misc_feature (1640)..(1640): Absent or X
  misc_feature (1641)..(1641): Absent or X
  misc_feature (1642)..(1642): Absent or X
  misc_feature (1643)..(1643): Absent or X
  misc_feature (1644)..(1644): Absent or X
  misc_feature (1645)..(1645): Absent or X
  misc_feature (1646)..(1646): Absent or X
  misc_feature (1647)..(1647): Absent or X
  misc_feature (1648)..(1648): Absent or X
  misc_feature (1649)..(1649): Absent or X
  misc_feature (1650)..(1650): Absent or X
  misc_feature (1651)..(1651): Absent or X
  misc_feature (1652)..(1652): Absent or X
  misc_feature (1653)..(1653): Absent or X
  misc_feature (1654)..(1654): Absent or X
  misc_feature (1655)..(1655): Absent or X
  misc_feature (1656)..(1656): Absent or X
  misc_feature (1657)..(1657): Absent or X
  misc_feature (1658)..(1658): Absent or X
  misc_feature (1659)..(1659): Absent or X
  misc_feature (1660)..(1660): Absent or X
  misc_feature (1661)..(1661): Absent or X
  misc_feature (1662)..(1662): Absent or X
  misc_feature (1663)..(1663): Absent or X
  misc_feature (1664)..(1664): Absent or X
  misc_feature (1665)..(1665): Absent or X
  misc_feature (1666)..(1666): Absent or X
  misc_feature (1667)..(1667): Absent or X
  misc_feature (1668)..(1668): Absent or X
  misc_feature (1669)..(1669): Absent or X
  misc_feature (1670)..(1670): Absent or X
  misc_feature (1671)..(1671): Absent or X
  misc_feature (1672)..(1672): Absent or X
  misc_feature (1673)..(1673): Absent or X
  misc_feature (1674)..(1674): Absent or X
  misc_feature (1675)..(1675): Absent or X
  misc_feature (1676)..(1676): Absent or X
  misc_feature (1677)..(1677): Absent or X
  misc_feature (1678)..(1678): Absent or X
  misc_feature (1679)..(1679): Absent or X
  misc_feature (1680)..(1680): Absent or X
  misc_feature (1681)..(1681): Absent or X
  misc_feature (1682)..(1682): Absent or X
  misc_feature (1683)..(1683): Absent or X
  misc_feature (1684)..(1684): Absent or X
  misc_feature (1685)..(1685): Absent or X
  misc_feature (1686)..(1686): Absent or X
  misc_feature (1687)..(1687): Absent or X
  misc_feature (1688)..(1688): Absent or X
  misc_feature (1689)..(1689): Absent or X
  misc_feature (1690)..(1690): Absent or X
  misc_feature (1691)..(1691): Absent or X
  misc_feature (1692)..(1692): Absent or X
  misc_feature (1693)..(1693): Absent or X
  misc_feature (1694)..(1694): Absent or X
  misc_feature (1695)..(1695): Absent or X
  misc_feature (1696)..(1696): Absent or X
  misc_feature (1697)..(1697): Absent or X
  misc_feature (1698)..(1698): Absent or X
  misc_feature (1699)..(1699): Absent or X
  misc_feature (1700)..(1700): Absent or X
  misc_feature (1701)..(1701): Absent or X
  misc_feature (1702)..(1702): Absent or X
  misc_feature (1703)..(1703): Absent or X
  misc_feature (1704)..(1704): Absent or X
  misc_feature (1705)..(1705): Absent or X
  misc_feature (1706)..(1706): Absent or X
  misc_feature (1707)..(1707): Absent or X
  misc_feature (1708)..(1708): Absent or X
  misc_feature (1709)..(1709): Absent or X
  misc_feature (1710)..(1710): Absent or X
  misc_feature (1711)..(1711): Absent or X
  misc_feature (1712)..(1712): Absent or X
  misc_feature (1713)..(1713): Absent or X
  misc_feature (1714)..(1714): Absent or X
  misc_feature (1715)..(1715): Absent or X
  misc_feature (1716)..(1716): Absent or X
  misc_feature (1717)..(1717): Absent or X
  misc_feature (1718)..(1718): Absent or X
  misc_feature (1719)..(1719): Absent or X
  misc_feature (1720)..(1720): Absent or X
  misc_feature (1721)..(1721): Absent or X
  misc_feature (1722)..(1722): Absent or X
  misc_feature (1723)..(1723): Absent or X
  misc_feature (1724)..(1724): Absent or X
  misc_feature (1725)..(1725): Absent or X
  misc_feature (1726)..(1726): Absent or X
  misc_feature (1727)..(1727): Absent or X
  misc_feature (1728)..(1728): Absent or X
  misc_feature (1729)..(1729): Absent or X
  misc_feature (1730)..(1730): Absent or X
  misc_feature (1731)..(1731): Absent or X
  misc_feature (1732)..(1732): Absent or X
  misc_feature (1733)..(1733): Absent or X
  misc_feature (1734)..(1734): Absent or X
  misc_feature (1735)..(1735): Absent or X
  misc_feature (1736)..(1736): Absent or X
  misc_feature (1737)..(1737): Absent or X
  misc_feature (1738)..(1738): Absent or X
  misc_feature (1739)..(1739): Absent or X
  misc_feature (1740)..(1740): Absent or X
  misc_feature (1741)..(1741): Absent or X
  misc_feature (1742)..(1742): Absent or X
  misc_feature (1743)..(1743): Absent or X
  misc_feature (1744)..(1744): Absent or X
  misc_feature (1745)..(1745): Absent or X
  misc_feature (1746)..(1746): Absent or X
  misc_feature (1747)..(1747): Absent or X
  misc_feature (1748)..(1748): Absent or X
  misc_feature (1749)..(1749): Absent or X
  misc_feature (1750)..(1750): Absent or X
  misc_feature (1751)..(1751): Absent or X
  misc_feature (1752)..(1752): Absent or X
  misc_feature (1753)..(1753): Absent or X
  misc_feature (1754)..(1754): Absent or X
  misc_feature (1755)..(1755): Absent or X
  misc_feature (1756)..(1756): Absent or X
  misc_feature (1757)..(1757): Absent or X
  misc_feature (1758)..(1758): Absent or X
  misc_feature (1759)..(1759): Absent or X
  misc_feature (1760)..(1760): Absent or X
  misc_feature (1761)..(1761): Absent or X
  misc_feature (1762)..(1762): Absent or X
  misc_feature (1763)..(1763): Absent or X
  misc_feature (1764)..(1764): Absent or X
  misc_feature (1765)..(1765): Absent or X
  misc_feature (1766)..(1766): Absent or X
  misc_feature (1767)..(1767): Absent or X
  misc_feature (1768)..(1768): Absent or X
  misc_feature (1769)..(1769): Absent or X
  misc_feature (1770)..(1770): Absent or X
  misc_feature (1771)..(1771): Absent or X
  misc_feature (1772)..(1772): Absent or X
  misc_feature (1773)..(1773): Absent or X
  misc_feature (1774)..(1774): Absent or X
  misc_feature (1775)..(1775): Absent or X
  misc_feature (1776)..(1776): Absent or X
  misc_feature (1777)..(1777): Absent or X
  misc_feature (1778)..(1778): Absent or X
  misc_feature (1779)..(1779): Absent or X
  misc_feature (1780)..(1780): Absent or X
  misc_feature (1781)..(1781): Absent or X
  misc_feature (1782)..(1782): Absent or X
  misc_feature (1783)..(1783): Absent or X
  misc_feature (1784)..(1784): Absent or X
  misc_feature (1785)..(1785): Absent or X
  misc_feature (1786)..(1786): Absent or X
  misc_feature (1787)..(1787): Absent or X
  misc_feature (1788)..(1788): Absent or X
  misc_feature (1789)..(1789): Absent or X
  misc_feature (1790)..(1790): Absent or X
  misc_feature (1791)..(1791): Absent or X
  misc_feature (1792)..(1792): Absent or X
  misc_feature (1793)..(1793): Absent or X
  misc_feature (1794)..(1794): Absent or X
  misc_feature (1795)..(1795): Absent or X
  misc_feature (1796)..(1796): Absent or X
  misc_feature (1797)..(1797): Absent or X
  misc_feature (1798)..(1798): Absent or X
  misc_feature (1799)..(1799): Absent or X
  misc_feature (1800)..(1800): Absent or X
  misc_feature (1801)..(1801): Absent or X
  misc_feature (1802)..(1802): Absent or X
  misc_feature (1803)..(1803): Absent or X
  misc_feature (1804)..(1804): Absent or X
  misc_feature (1805)..(1805): Absent or X
  misc_feature (1806)..(1806): Absent or X
  misc_feature (1807)..(1807): Absent or X
  misc_feature (1808)..(1808): Absent or X
  misc_feature (1809)..(1809): Absent or X
  misc_feature (1810)..(1810): Absent or X
  misc_feature (1811)..(1811): Absent or X
  misc_feature (1812)..(1812): Absent or X
  misc_feature (1813)..(1813): Absent or X
  misc_feature (1814)..(1814): Absent or X
  misc_feature (1815)..(1815): Absent or X
  misc_feature (1816)..(1816): Absent or X
  misc_feature (1817)..(1817): Absent or X
  misc_feature (1818)..(1818): Absent or X
  misc_feature (1819)..(1819): Absent or X
  misc_feature (1820)..(1820): Absent or X
  misc_feature (1821)..(1821): Absent or X
  misc_feature (1822)..(1822): Absent or X
  misc_feature (1823)..(1823): Absent or X
  misc_feature (1824)..(1824): Absent or X
  misc_feature (1825)..(1825): Absent or X
  misc_feature (1826)..(1826): Absent or X
  misc_feature (1827)..(1827): Absent or X
  misc_feature (1828)..(1828): Absent or X
  misc_feature (1829)..(1829): Absent or X
  misc_feature (1830)..(1830): Absent or X
  misc_feature (1831)..(1831): Absent or X
  misc_feature (1832)..(1832): Absent or X
  misc_feature (1833)..(1833): Absent or X
  misc_feature (1834)..(1834): Absent or X
  misc_feature (1835)..(1835): Absent or X
  misc_feature (1836)..(1836): Absent or X
  misc_feature (1837)..(1837): Absent or X
  misc_feature (1838)..(1838): Absent or X
  misc_feature (1839)..(1839): Absent or X
  misc_feature (1840)..(1840): Absent or X
  misc_feature (1841)..(1841): Absent or X
  misc_feature (1842)..(1842): Absent or X
  misc_feature (1843)..(1843): Absent or X
  misc_feature (1844)..(1844): Absent or X
  misc_feature (1845)..(1845): Absent or X
  misc_feature (1846)..(1846): Absent or X
  misc_feature (1847)..(1847): Absent or X
  misc_feature (1848)..(1848): Absent or X
  misc_feature (1849)..(1849): Absent or X
  misc_feature (1850)..(1850): Absent or X
  misc_feature (1851)..(1851): Absent or X
  misc_feature (1852)..(1852): Absent or X
  misc_feature (1853)..(1853): Absent or X
  misc_feature (1854)..(1854): Absent or X
  misc_feature (1855)..(1855): Absent or X
  misc_feature (1856)..(1856): Absent or X
  misc_feature (1857)..(1857): Absent or X
  misc_feature (1858)..(1858): Absent or X
  misc_feature (1859)..(1859): Absent or X
  misc_feature (1860)..(1860): Absent or X
  misc_feature (1861)..(1861): Absent or X
  misc_feature (1862)..(1862): Absent or X
  misc_feature (1863)..(1863): Absent or X
  misc_feature (1864)..(1864): Absent or X
  misc_feature (1865)..(1865): Absent or X
  misc_feature (1866)..(1866): Absent or X
  misc_feature (1867)..(1867): Absent or X
  misc_feature (1868)..(1868): Absent or X
  misc_feature (1869)..(1869): Absent or X
  misc_feature (1870)..(1870): Absent or X
  misc_feature (1871)..(1871): Absent or X
  misc_feature (1872)..(1872): Absent or X
  misc_feature (1873)..(1873): Absent or X
  misc_feature (1874)..(1874): Absent or X
  misc_feature (1875)..(1875): Absent or X
  misc_feature (1876)..(1876): Absent or X
  misc_feature (1877)..(1877): Absent or X
  misc_feature (1878)..(1878): Absent or X
  misc_feature (1879)..(1879): Absent or X
  misc_feature (1880)..(1880): Absent or X
  misc_feature (1881)..(1881): Absent or X
  misc_feature (1882)..(1882): Absent or X
  misc_feature (1883)..(1883): Absent or X
  misc_feature (1884)..(1884): Absent or X
  misc_feature (1885)..(1885): Absent or X
  misc_feature (1886)..(1886): Absent or X
  misc_feature (1887)..(1887): Absent or X
  misc_feature (1888)..(1888): Absent or X
  misc_feature (1889)..(1889): Absent or X
  misc_feature (1890)..(1890): Absent or X
  misc_feature (1891)..(1891): Absent or X
  misc_feature (1892)..(1892): Absent or X
  misc_feature (1893)..(1893): Absent or X
  misc_feature (1894)..(1894): Absent or X
  misc_feature (1895)..(1895): Absent or X
  misc_feature (1896)..(1896): Absent or X
  misc_feature (1897)..(1897): Absent or X
  misc_feature (1898)..(1898): Absent or X
  misc_feature (1899)..(1899): Absent or X
  misc_feature (1900)..(1900): Absent or X
  misc_feature (1901)..(1901): Absent or X
  misc_feature (1902)..(1902): Absent or X
  misc_feature (1903)..(1903): Absent or X
  misc_feature (1904)..(1904): Absent or X
  misc_feature (1905)..(1905): Absent or X
  misc_feature (1906)..(1906): Absent or X
  misc_feature (1907)..(1907): Absent or X
  misc_feature (1908)..(1908): Absent or X
  misc_feature (1909)..(1909): Absent or X
  misc_feature (1910)..(1910): Absent or X
  misc_feature (1911)..(1911): Absent or X
  misc_feature (1912)..(1912): Absent or X
  misc_feature (1913)..(1913): Absent or X
  misc_feature (1914)..(1914): Absent or X
  misc_feature (1915)..(1915): Absent or X
  misc_feature (1916)..(1916): Absent or X
  misc_feature (1917)..(1917): Absent or X
  misc_feature (1918)..(1918): Absent or X
  misc_feature (1919)..(1919): Absent or X
  misc_feature (1920)..(1920): Absent or X
  misc_feature (1921)..(1921): Absent or X
  misc_feature (1922)..(1922): Absent or X
  misc_feature (1923)..(1923): Absent or X
  misc_feature (1924)..(1924): Absent or X
  misc_feature (1925)..(1925): Absent or X
  misc_feature (1926)..(1926): Absent or X
  misc_feature (1927)..(1927): Absent or X
  misc_feature (1928)..(1928): Absent or X
  misc_feature (1929)..(1929): Absent or X
  misc_feature (1930)..(1930): Absent or X
  misc_feature (1931)..(1931): Absent or X
  misc_feature (1932)..(1932): Absent or X
  misc_feature (1933)..(1933): Absent or X
  misc_feature (1934)..(1934): Absent or X
  misc_feature (1935)..(1935): Absent or X
  misc_feature (1936)..(1936): Absent or X
  misc_feature (1937)..(1937): Absent or X
  misc_feature (1938)..(1938): Absent or X
  misc_feature (1939)..(1939): Absent or X
  misc_feature (1940)..(1940): Absent or X
  misc_feature (1941)..(1941): Absent or X
  misc_feature (1942)..(1942): Absent or X
  misc_feature (1943)..(1943): Absent or X
  misc_feature (1944)..(1944): Absent or X
  misc_feature (1945)..(1945): Absent or X
  misc_feature (1946)..(1946): Absent or X
  misc_feature (1947)..(1947): Absent or X
  misc_feature (1948)..(1948): Absent or X
  misc_feature (1949)..(1949): Absent or X
  misc_feature (1950)..(1950): Absent or X
  misc_feature (1951)..(1951): Absent or X
  misc_feature (1952)..(1952): Absent or X
  misc_feature (1953)..(1953): Absent or X
  misc_feature (1954)..(1954): Absent or X
  misc_feature (1955)..(1955): Absent or X
  misc_feature (1956)..(1956): Absent or X
  misc_feature (1957)..(1957): Absent or X
  misc_feature (1958)..(1958): Absent or X
  misc_feature (1959)..(1959): Absent or X
  misc_feature (1960)..(1960): Absent or X
  misc_feature (1961)..(1961): Absent or X
  misc_feature (1962)..(1962): Absent or X
  misc_feature (1963)..(1963): Absent or X
  misc_feature (1964)..(1964): Absent or X
  misc_feature (1965)..(1965): Absent or X
  misc_feature (1966)..(1966): Absent or X
  misc_feature (1967)..(1967): Absent or X
  misc_feature (1968)..(1968): Absent or X
  misc_feature (1969)..(1969): Absent or X
  misc_feature (1970)..(1970): Absent or X
  misc_feature (1971)..(1971): Absent or X
  misc_feature (1972)..(1972): Absent or X
  misc_feature (1973)..(1973): Absent or X
  misc_feature (1974)..(1974): Absent or X
  misc_feature (1975)..(1975): Absent or X
  misc_feature (1976)..(1976): Absent or X
  misc_feature (1977)..(1977): Absent or X
  misc_feature (1978)..(1978): Absent or X
  misc_feature (1979)..(1979): Absent or X
  misc_feature (1980)..(1980): Absent or X
  misc_feature (1981)..(1981): Absent or X
  misc_feature (1982)..(1982): Absent or X
  misc_feature (1983)..(1983): Absent or X
  misc_feature (1984)..(1984): Absent or X
  misc_feature (1985)..(1985): Absent or X
  misc_feature (1986)..(1986): Absent or X
  misc_feature (1987)..(1987): Absent or X
  misc_feature (1988)..(1988): Absent or X
  misc_feature (1989)..(1989): Absent or X
  misc_feature (1990)..(1990): Absent or X
  misc_feature (1991)..(1991): Absent or X
  misc_feature (1992)..(1992): Absent or X
  misc_feature (1993)..(1993): Absent or X
  misc_feature (1994)..(1994): Absent or X
  misc_feature (1995)..(1995): Absent or X
  misc_feature (1996)..(1996): Absent or X
  misc_feature (1997)..(1997): Absent or X
  misc_feature (1998)..(1998): Absent or X
  misc_feature (1999)..(1999): Absent or X
  misc_feature (2000)..(2000): Absent or X
  misc_feature (2001)..(2001): Absent or X
  misc_feature (2002)..(2002): Absent or X
  misc_feature (2003)..(2003): Absent or X
  misc_feature (2004)..(2004): Absent or X
  misc_feature (2005)..(2005): Absent or X
  misc_feature (2006)..(2006): Absent or X
  misc_feature (2007)..(2007): Absent or X
  misc_feature (2008)..(2008): Absent or X
  misc_feature (2009)..(2009): Absent or X
  misc_feature (2010)..(2010): Absent or X
  misc_feature (2011)..(2011): Absent or X
  misc_feature (2012)..(2012): Absent or X
  misc_feature (2013)..(2013): Absent or X
  misc_feature (2014)..(2014): Absent or X
  misc_feature (2015)..(2015): Absent or X
  misc_feature (2016)..(2016): Absent or X
  misc_feature (2017)..(2017): Absent or X
  misc_feature (2018)..(2018): Absent or X
  misc_feature (2019)..(2019): Absent or X
  misc_feature (2020)..(2020): Absent or X
  misc_feature (2021)..(2021): Absent or X
  misc_feature (2022)..(2022): Absent or X
  misc_feature (2023)..(2023): Absent or X
  misc_feature (2024)..(2024): Absent or X
  misc_feature (2025)..(2025): Absent or X
  misc_feature (2026)..(2026): Absent or X
  misc_feature (2027)..(2027): Absent or X
  misc_feature (2028)..(2028): Absent or X
  misc_feature (2029)..(2029): Absent or X
  misc_feature (2030)..(2030): Absent or X
  misc_feature (2031)..(2031): Absent or X
  misc_feature (2032)..(2032): Absent or X
  misc_feature (2033)..(2033): Absent or X
  misc_feature (2034)..(2034): Absent or X
  misc_feature (2035)..(2035): Absent or X
  misc_feature (2036)..(2036): Absent or X
  misc_feature (2037)..(2037): Absent or X
  misc_feature (2038)..(2038): Absent or X
  misc_feature (2039)..(2039): Absent or X
  misc_feature (2040)..(2040): Absent or X
  misc_feature (2041)..(2041): Absent or X
  misc_feature (2042)..(2042): Absent or X
  misc_feature (2043)..(2043): Absent or X
  misc_feature (2044)..(2044): Absent or X
  misc_feature (2045)..(2045): Absent or X
  misc_feature (2046)..(2046): Absent or X
  misc_feature (2047)..(2047): Absent or X
  misc_feature (2048)..(2048): Absent or X
  misc_feature (2049)..(2049): Absent or X
  misc_feature (2050)..(2050): Absent or X
  misc_feature (2051)..(2051): Absent or X
  misc_feature (2052)..(2052): Absent or X
  misc_feature (2053)..(2053): Absent or X
  misc_feature (2054)..(2054): Absent or X
  misc_feature (2055)..(2055): Absent or X
  misc_feature (2056)..(2056): Absent or X
  misc_feature (2057)..(2057): Absent or X
  misc_feature (2058)..(2058): Absent or X
  misc_feature (2059)..(2059): Absent or X
  misc_feature (2060)..(2060): Absent or X
  misc_feature (2061)..(2061): Absent or X
  misc_feature (2062)..(2062): Absent or X
  misc_feature (2063)..(2063): Absent or X
  misc_feature (2064)..(2064): Absent or X
  misc_feature (2065)..(2065): Absent or X
  misc_feature (2066)..(2066): Absent or X
  misc_feature (2067)..(2067): Absent or X
  misc_feature (2068)..(2068): Absent or X
  misc_feature (2069)..(2069): Absent or X
  misc_feature (2070)..(2070): Absent or X
  misc_feature (2071)..(2071): Absent or X
  misc_feature (2072)..(2072): Absent or X
  misc_feature (2073)..(2073): Absent or X
  misc_feature (2074)..(2074): Absent or X
  misc_feature (2075)..(2075): Absent or X
  misc_feature (2076)..(2076): Absent or X
  misc_feature (2077)..(2077): Absent or X
  misc_feature (2078)..(2078): Absent or X
  misc_feature (2079)..(2079): Absent or X
  misc_feature (2080)..(2080): Absent or X
  misc_feature (2081)..(2081): Absent or X
  misc_feature (2082)..(2082): Absent or X
  misc_feature (2083)..(2083): Absent or X
  misc_feature (2084)..(2084): Absent or X
  misc_feature (2085)..(2085): Absent or X
  misc_feature (2086)..(2086): Absent or X
  misc_feature (2087)..(2087): Absent or X
  misc_feature (2088)..(2088): Absent or X
  misc_feature (2089)..(2089): Absent or X
  misc_feature (2090)..(2090): Absent or X
  misc_feature (2091)..(2091): Absent or X
  misc_feature (2092)..(2092): Absent or X
  misc_feature (2093)..(2093): Absent or X
  misc_feature (2094)..(2094): Absent or X
  misc_feature (2095)..(2095): Absent or X
  misc_feature (2096)..(2096): Absent or X
  misc_feature (2097)..(2097): Absent or X
  misc_feature (2098)..(2098): Absent or X
  misc_feature (2099)..(2099): Absent or X
  misc_feature (2100)..(2100): Absent or X
  misc_feature (2101)..(2101): Absent or X
  misc_feature (2102)..(2102): Absent or X
  misc_feature (2103)..(2103): Absent or X
  misc_feature (2104)..(2104): Absent or X
  misc_feature (2105)..(2105): Absent or X
  misc_feature (2106)..(2106): Absent or X
  misc_feature (2107)..(2107): Absent or X
  misc_feature (2108)..(2108): Absent or X
  misc_feature (2109)..(2109): Absent or X
  misc_feature (2110)..(2110): Absent or X
  misc_feature (2111)..(2111): Absent or X
  misc_feature (2112)..(2112): Absent or X
  misc_feature (2113)..(2113): Absent or X
  misc_feature (2114)..(2114): Absent or X
  misc_feature (2115)..(2115): Absent or X
  misc_feature (2116)..(2116): Absent or X
  misc_feature (2117)..(2117): Absent or X
  misc_feature (2118)..(2118): Absent or X
  misc_feature (2119)..(2119): Absent or X
  misc_feature (2120)..(2120): Absent or X
  misc_feature (2121)..(2121): Absent or X
  misc_feature (2122)..(2122): Absent or X
  misc_feature (2123)..(2123): Absent or X
  misc_feature (2124)..(2124): Absent or X
  misc_feature (2125)..(2125): Absent or X
  misc_feature (2126)..(2126): Absent or X
  misc_feature (2127)..(2127): Absent or X
  misc_feature (2128)..(2128): Absent or X
  misc_feature (2129)..(2129): Absent or X
  misc_feature (2130)..(2130): Absent or X
  misc_feature (2131)..(2131): Absent or X
  misc_feature (2132)..(2132): Absent or X
  misc_feature (2133)..(2133): Absent or X
  misc_feature (2134)..(2134): Absent or X
  misc_feature (2135)..(2135): Absent or X
  misc_feature (2136)..(2136): Absent or X
  misc_feature (2137)..(2137): Absent or X
  misc_feature (2138)..(2138): Absent or X
  misc_feature (2139)..(2139): Absent or X
  misc_feature (2140)..(2140): Absent or Asp
  misc_feature (2141)..(2141): Absent or His
  misc_feature (2142)..(2142): Absent or Phe
  misc_feature (2143)..(2143): Absent or Ile
  misc_feature (2144)..(2144): Absent or Asn
  misc_feature (2145)..(2145): Absent or Phe
  misc_feature (2146)..(2146): Absent or His
  misc_feature (2147)..(2147): Absent or Asn
  misc_feature (2148)..(2148): Absent or Phe
  misc_feature (2149)..(2149): Absent or Gln
  misc_feature (2150)..(2150): Absent or Pro
  misc_feature (2151)..(2151): Absent or His
  misc_feature (2152)..(2152): Absent or Pro
  misc_feature (2153)..(2153): Absent or Asp
  misc_feature (2154)..(2154): Absent or Pro
  misc_feature (2155)..(2155): Absent or His
  misc_feature (2156)..(2156): Absent or Thr
  unsure (1)..(2156): unsure at all Xaa locations
XXXXXXXXXXXXXXXXXXXXXXXXXXXXXXXXXXXXXXXXXXXXXXXXXXXXXXXXXXXXXXPXXXXSRPXLGFPLGTALLLXXIFXLSGXFSCCYHWDKXRXXXXXRXXXXXXXXXXXXXXXXXXXXXPXKXXXXXXXXXXXXXXXXXXXXXXXXXXXXXXXXXXXXXXXXXXXXXXXXVXMPGDXXPKFXAXXXPCXXXXXXXXXXXXXXXXXXXXXXXXXXXXXXXXXXXXXXXXXXXXXXXXXXXXXXXXXXXXXXXXXXXXXXXXXXXXXXXXXXXXXXXXXXXXXXXXXXXXXXXXXXXXXXXXXXXXXXXXXXXXXXXXXXXXXXXXXXXXXXXXXXXXXXXXXXXXXXXXXXXXXXXXXXXXXXXXXXXXXXXXXXXXXXXXXXXXXXXXXXXXXXXXXXXXXXXXXXXXXXXXXXXXXXXXXXXXXXXXXXXXXXXXXXXXXXXXXXXXXXXXXXXXXXXXXXXXXXXXXXXXXXXXXXXXXXXXXXXXXXXXXXXXXXXXXXXXXXXXXXXXXXXXXXXXXXXXXXXXXXXXXXXXXXXXXXXXXXXXXXXXXXXXXXXXXXXXXXXXXXXXXXXXXXXXXXXXXXXXXXXXXXXXXXXXXXXXXXXXXXXXXXXXXXXXXXXXXXXXXXXXXXXXXXXXXXXXXXXXXXXXXXXXXXXXXXXXXXXXXXXXXXXXXXXXXXXXXXXXXXXXXXXXXXXXXXXXXXXXXXXXXXXXXXXXXXXXXXXXXXXXXXXXXXXXXXXXXXXXXXXXXXXXXXXXXXXXXXXXXXXXXXXXXXXXXXXXXXXXXXXXXXXXXXXXXXXXXXXXXXXXXXXXXXXXXXXXXXXXXXXXXXXXXXXXXXXXXXXXXXXXXXXXXXXXXXXXXXXXXXXXXXXXXXXXXXXXXXXXXXXXXXXXXXXXXXXXXXXXXXXXXXXXXXXXXXXXXXXXXXXXXXXXXXXXXXXXXXXXXXXXXXXXXXXXXXXXXXXXXXXXXXXXXXXXXXXXXXXXXXXXXXXXXXXXXXXXXXXXXXXXXXXXXXXXXXXXXXXXXXXXXXXXXXXXXXXXXXXXXXXXXXXXXXXXXXXXXXXXXXXXXXXXXXXXXXXXXXXXXXXXXXXXXXXXXXXXXXXXXXXXXXXXXXXXXXXXXXXXXXXXXXXXXXXXXXXXXXXXXXXXXXXXXXXXXXXXXXXXXXXXXXXXXXXXXXXXXXXXXXXXXXXXXXXXXXXXXXXXXXXXXXXXXXXXXXXXXXXXXXXXXXXXXXXXXXXXXXXXXXXXXXXXXXXXXXXXXXXXXXXXXXXXXXXXXXXXXXXXXXXXXXXXXXXXXXXXXXXXXXXXXXXXXXXXXXXXXXXXXXXXXXXXXXXXXXXXXXXXXXXXXXXXXXXXXXXXXXXXXXXXXXXXXXXXXXXXXXXXXXXXXXXXXXXXXXXXXXXXXXXXXXXXXXXXXXXXXXXXXXXXXXXXXXXXXXXXXXXXXXXXXXXXXXXXXXXXXXXXXXXXXXXXXXXXXXXXXXXXXXXXXXXXXXXXXXXXXXXXXXXXXXXXXXXXXXXXXXXXXXXXXXXXXXXXXXXXXXXXXXXXXXXXXXXXXXXXXXXXXXXXXXXXXXXXXXXXXXXXXXXXXXXXXXXXXXXXXXXXXXXXXXXXXXXXXXXXXXXXXXXXXXXXXXXXXXXXXXXXXXXXXXXXXXXXXXXXXXXXXXXXXXXXXXXXXXXXXXXXXXXXXXXXXXXXXXXXXXXXXXXXXXXXXXXXXXXXXXXXXXXXXXXXXXXXXXXXXXXXXXXXXXXXXXXXXXXXXXXXXXXXXXXXXXXXXXXXXXXXXXXXXXXXXXXXXXXXXXXXXXXXXXXXXXXXXXXXXXXXXXXXXXXXXXXXXXXXXXXXXXXXXXXXXXXXXXXXXXXXXXXXXXXXXXXXXXXXXXXXXXXXXXXXXXXXXXXXXXXXXXXXXXXXXXXXXXXXXXXXXXXXXXXXXXXXXXXXXXXXXXXXXXXXXXXXXXXXXXXXXXXXXXXXXXXXXXXXXXXXXXXXXXXXXXXXXXXXXXXXXXXXXXXXXXXXXXXXXXXXXXXXXXXXXXXXXXXXXXXXXXXXXXXXXXXXXXXXXXXXXXXXXXXXXXXXXXXXXXXXXXXXXXXXXXXXXXXXXXXXXXXXXXXXXXXXXXXXXXXXXXXXXXXXXXXXXXXXXX
